(19) United States
(12) Patent Application Publication
(10) Pub. No.: US 2019/0010506 A1
(43) Pub. Date: Jan. 10, 2019

(54) BACTERIA ENGINEERED TO TREAT METABOLIC DISEASES

(71) Applicant: SYNLOGIC, INC., Cambridge, MA (US)

(72) Inventors: Dean Falb, Sherborn, MA (US); Vincent M. Isabella, Cambridge, MA (US); Jonathan W. Kotula, Somerville, MA (US); Paul F. Miller, Salem, CT (US); Yves Millet, Newton, MA (US); Adam B. Fisher, Cambridge, MA (US); Sarah Elizabeth Rowe, Somerville, MA (US); Alex Tucker, Somerville, MA (US)

(21) Appl. No.: 16/069,266

(22) PCT Filed: Dec. 28, 2016
(86) PCT No.: PCT/US2016/069052

§ 371 Date: Jul. 11, 2018

Related U.S. Application Data
(63) Continuation of application No. 15/260,319, filed on Sep. 8, 2016.
Application No. 15/260,319 is a continuation-in-part of application No. PCT/US2016/020530, filed on Mar. 2, 2016.
Application No. PCT/US2016/020530 is a continuation-in-part of application No. PCT/US2016/093444, filed on Jun. 24, 2016.
Application No. PCT/US2016/093444 is a continuation-in-part of application No. PCT/US2016/050836, filed on Sep. 8, 2016.
Application No. PCT/US2016/050836 is a continuation-in-part of application No. PCT/US2016/032565, filed on May 13, 2016.
(60) Provisional application No. 62/423,170, filed on Nov. 16, 2016.
(60) Provisional application No. 62/291,468, filed on Feb. 4, 2016.
(60) Provisional application No. 62/291,461, filed on Feb. 4, 2016.
(60) Provisional application No. 62/291,470, filed on Feb. 4, 2016.
(60) Provisional application No. 62/385,235, filed on Sep. 8, 2016.
(60) Provisional application No. 62/362,954, filed on Jul. 15, 2016.
(60) Provisional application No. 62/354,681, filed on Jun. 24, 2016.
(60) Provisional application No. 62/354,682, filed on Jun. 24, 2016.
(60) Provisional application No. 62/348,416, filed on Jun. 10, 2016.
(60) Provisional application No. 62/348,620, filed on Jun. 10, 2016.
(60) Provisional application No. 62/347,554, filed on Jun. 8, 2016.
(60) Provisional application No. 62/336,012, filed on May 13, 2016.
(60) Provisional application No. 62/277,346, filed on Jan. 11, 2016.
(60) Provisional application No. 62/362,863, filed on Jul. 15, 2016.
(60) Provisional application No. 62/347,508, filed on Jun. 8, 2016.
(60) Provisional application No. 62/347,576, filed on Jun. 8, 2016.
(60) Provisional application No. 62/293,695, filed on Feb. 10, 2016.

(51) Int. Cl. C12N 15/70; A61K 31/19; C12N 9/12; C12N 9/02; A61K 38/44; A61K 38/26; A61K 38/20; A61K 35/741; A61K 31/198; A61K 35/00

(52) U.S. Cl. CPC C12N 15/70; Y02A 50/473; C12Y 115/01001; A61K 31/19; C12Y 103/08001; C12N 9/1217; C12N 9/001; A61K 38/446; A61K 38/26; A61K 38/2066; A61K 38/2013; A61K 38/20; A61K 35/741; A61K 31/198; A61K 2035/115; C12Y 207/02007

(57) ABSTRACT

Genetically engineered bacteria, pharmaceutical compositions thereof, and methods of attenuating metabolic diseases are disclosed.

### RELATED APPLICATIONS

[0001] The present application claims the benefit of priority to U.S. Provisional Patent Application No. 62/277,346, filed Jan. 11, 2016, U.S. Provisional Patent Application No. 62/293,695, filed Feb. 10, 2016, U.S. Provisional Patent Application No. 62/336,012, filed May 13, 2016, International Application No. PCT/US2016/032565, filed May 13, 2016, U.S. Provisional Patent Application No. 62/347,508, filed Jun. 8, 2016, U.S. Provisional Patent Application No. 62/347,554, filed Jun. 8, 2016, U.S. Provisional Patent Application No. 62/347,576, filed Jun. 8, 2016, U.S. Provisional Patent Application No. 62/348,416, filed Jun. 10, 2016, U.S. Provisional Patent Application No. 62/348,620, filed Jun. 10, 2016, U.S. Provisional Patent Application No. 62/354,681, filed Jun. 24, 2016, U.S. Provisional Patent Application No. 62/354,682, filed Jun. 24, 2016, International Application No. PCT/US2016/039444, filed Jun. 24, 2016, U.S. Provisional Patent Application No. 62/362,954, filed Jul. 15, 2016, U.S. Provisional Patent Application No. 62/385,235, filed Sep. 8, 2016, U.S. application Ser. No. 15/260,319, filed Sep. 9, 2016, International Application No. PCT/US2016/050836, filed Sep. 8, 2016, and U.S. Provisional Patent Application No. 62/423,170, filed Nov. 16, 2016, the contents of which are hereby incorporated by reference herein in their entirety.

### BACKGROUND

[0002] Compositions and therapeutic methods for treating metabolic diseases are provided. In certain aspects, the compositions of the invention comprise bacteria that are genetically engineered to treat, modulate, and/or ameliorate metabolic diseases, particularly in low-oxygen environments, such as in the mammalian gut. In certain aspects, the compositions and methods of the invention as disclosed herein may be used for treating metabolic diseases such as obesity and type 2 diabetes. Obesity is caused by an imbalance between energy intake and expenditure, leading to the accumulation of unused energy in the form of fat. The World Health Organization considers obesity to be a global epidemic, and the United States Centers for Disease Control and Prevention estimates that nearly one third of adult Americans are obese. Diet and exercise may help reduce obesity and its associated pathologies, but adherence to a strict diet and exercise regime is challenging. Obesity may also be caused by other factors, e.g., mutations in genes regulating metabolic pathways (e.g., satiety, fatty acid oxidation, and mitochondrial function), which can contribute to energy imbalance. For example, congenital deficits in the signaling pathways for leptin, a satiety hormone, are known to cause obesity in humans and animal models.

[0003] Patients suffering from obesity are at increased risk of developing adverse physiological conditions, e.g., non-alcoholic fatty liver, cardiovascular diseases, type 2 diabetes mellitus (T2DM). The incidence of T2DM has increased 300% in the last three decades in the United States. T2DM patients are resistant to the effects of insulin, a hormone that regulates blood glucose levels, and frequently experience hyperglycemia, a condition in which blood glucose is above physiologically tolerable levels. When left untreated, hyperglycemia can result in severe complications such as hypertension, cardiovascular disease, inflammatory disease, blood vessel damage, nerve damage, cancer, and diabetes-induced coma.

[0004] T2DM involves the dysregulation of multiple metabolic organs, such as the pancreas, liver, skeletal muscle, adipose tissue, and brain, and it has been challenging to design therapeutics that target multiple tissue while avoiding systemic side effects. Insulin has been the first-line treatment for T2DM for decades. However, patients with severe T2DM may not respond to the insulin as a result of chronic insulin resistance. In addition, insulin must be administered multiple times throughout the day, which can adversely affect quality of life. Multiple therapies have been developed to treat T2DM, but not without limitations and sometimes life-threatening side effects. For example, thiazolidinedione was once widely used in order to increase the glucose metabolism in patients. However, the compound has been pulled from certain markets due to an increased association with heart failure (Nissen et al., 2007). Likewise, inhibitors of dipeptidyl peptidase-4 (DPP-4) have shown therapeutic promise, but may be linked to increased risk of pancreatic diseases (Karagiannis, et al., 2014).

[0005] Recently, researchers have demonstrated the close relationship between gut bacteria and metabolic disease (Harley et al., 2012). In obese mice, the ratio of firmicutes to bacteroidetes bacteria is increased (Harley et al., 2012; Mathur et al., 2015). These bacteria extract different amounts of energy from food, which may contribute to changes in energy balance. Similar changes have been also been observed in human studies (Harley et al., 2012; Mathur et al., 2015). Several molecules that are produced by gut bacteria have been shown to be metabolic regulators. For example, gut bacteria digest and break down dietary fiber into molecules such as acetate, butyrate, and propionate. These molecules are absorbed through intestinal cells, transferred to organs such as the liver and brain, and produce physiological changes, such as de novo glucose production and lipid synthesis (Brüssow et al., 2014; De Vadder et al., 2014; Lin et al., 2012). There has been an effort to engineer bacteria that produce N-acylphosphatidylethanolamines (NAPEs) (Chen et al., 2014). However, these bacteria express NAPEs constitutively and systemically, and NAPEs may be capable of “displac[ing] cholesterol from raft-like structures [and] may have dramatic implications for neural cell membrane function during stress and injury” (Terova et al., 2005). Thus, there is significant unmet need for effective, reliable, and/or long-term treatment for metabolic diseases, including obesity and T2DM.

### SUMMARY

[0006] The disclosure provides genetically engineered bacteria that are capable of treating metabolic diseases, including but not limited to, type 2 diabetes, obesity-related symptoms, Nonalcoholic Steatohepatitis (NASH), Prader Willi Syndrome, and cardiovascular disorders. The genetically engineered bacteria comprise one or more gene(s) or gene cassette(s), for the production of molecules which, inter alia, act as metabolic and/or satiety effectors and/or modulators of the inflammatory status and/or are able convert excess bile salts into non-toxic molecules, as described herein.

[0007] Another aspect of the invention provides methods for selecting or targeting genetically engineered bacteria based on increased levels of metabolite consumption, or production of certain metabolites. The invention also provides pharmaceutical compositions comprising the genetically engineered bacteria, and methods of modulating and treating disorders associated with metabolic disorders.

[0008] In some embodiments, the invention provides genetically engineered bacteria that are capable of producing one or more metabolic and/or satiety effector molecule(s), and/or one or more modulator(s) of inflammation, and/or one or more molecule(s) which reduces excess bile salt levels, and/or combinations thereof. In some embodiments, the invention provides genetically engineered bacteria that are capable of producing one or more metabolic and/or satiety effector molecule(s), and/or one or more modulator(s) of inflammation, and/or one or more molecule(s) which reduces excess bile salt levels, and/or combinations thereof, particularly in low-oxygen environments, e.g., the gut. In certain embodiments, the genetically engineered bacteria are non-pathogenic and may be introduced into the gut in order to treat metabolic diseases. In certain embodiments, the metabolic and/or satiety effector molecule and/or modulator of inflammation or/and or effector of excess bile salt reduction is stably produced by the genetically engineered bacteria, and/or the genetically engineered bacteria are stably maintained in vivo and/or in vitro. The invention also provides pharmaceutical compositions comprising the genetically engineered bacteria, and methods of modulating and treating metabolic diseases.

[0009] In some embodiments, the genetically engineered bacteria comprise one or more gene(s) or gene cassette(s) or circuit(s), containing one or more native or non-native component(s), which mediate one or more mechanisms of action. The genetically engineered bacteria harbor these genes or gene cassettes or circuits on a plasmid or, alternatively, the genes/gene cassettes have been inserted into the chromosome at certain regions, where they do not interfere with essential gene expression. Additionally, one or more endogenous genes or regulatory regions within the bacterial chromosome may be mutated or deleted.

[0010] In some embodiments, the genetically engineered bacteria comprise one or more of the following: (1) one or more gene(s) or gene cassette(s) for the production of propionate, as described herein (2) one or more gene(s) or gene cassette(s) for the production of butyrate, as described herein (3) one or more gene(s) or gene cassette(s) for the production of acetate, as described herein (4) one or more gene(s) or gene cassette(s) for the production of one or more of GLP-1 and GLP-1 analogs, as described herein (4) one or more gene(s) or gene cassette(s) for the production of one or more bile salt hydrolases, as described herein (5) one or more gene(s) or gene cassette(s) for the production of tryptophan, as described herein; (6) one or more genes or gene cassettes for the production of a tryptophan metabolite, including an indole and/or indole metabolite, as described herein; (7) one or more genes for the production of one or more transporters, e.g. for the import of bile salts and/or metabolites, e.g. tryptophan and/or tryptophan metabolites, as described herein; (8) one or more polypetides for secretion, including but not limited to secretion of GLP-1 and its analogs, bile salt hydrolases, and tryptophan synthetic and/or catabolic enzymes of the tryptophan degradation pathways, and/or short chain fatty acid synthesis enzymes, in wild type or in mutated form (for increased stability or metabolic activity); (9) one or more components of secretion machinery, as described herein (10) one or more auxotrophies, e.g., deltaThyA; (11) one more more antibiotic resistances, including but not limited to, kanamycin or chloramphenicol resistance; (12) one or more mutations/deletions to increase the flux through a metabolic pathway encoded by one or more genes or gene cassette(s), e.g. mutations/deletions in genes in NADH consuming pathways, genes involved in feedback inhibition of a metabolic pathway encoded by the gene(s) or gene cassette(s) genes, as described herein; and (13) one or more mutations/deletions in one or more genes of the endogenous metabolic pathways, e.g., tryptophan synthesis pathway.

[0011] These gene(s)/gene cassette(s) may be under the control of constitutive or inducible promoters. Exemplary inducible promoters described herein include oxygen level-dependent promoters (e.g., FNR-inducible promoter), promoters induced by molecules or metabolites indicative of liver damage (e.g., bilirubin) and/or metabolic disease, promoters induced by inflammation or an inflammatory response (RNS, ROS promoters), and promoters induced by a metabolite that may or may not be naturally present in the gut, e.g., arabinose and tetracycline and othere described herein (e.g., metabolites not naturally present in the gut can be exogenously added). These gene(s)/gene cassette(s) may be under the control of constitutive and/or inducible promoters which are active or induced under in vitro conditions, e.g., during bacterial growth in a flask or other appropriate vessel for bacterial expansion, production, and/or manufacture, as described herein.

### BRIEF DESCRIPTION OF THE FIGURES

[0012] FIG. 1 depicts a schematic of an E. coli that is genetically engineered to express a kynurenine biosynthesis cassette and/or a tryptophan biosynthesis cassette and/or tryptophan catabolic cassette which produces bioactive tryptophan metabolites described herein and/or GLP-1 and/or a propionate gene cassette and/or a butyrate gene cassette under the control of a FNR-responsive promoter and further comprising a secretion system and a metabolite transporter system.

[0013] FIG. 2A depicts a metabolic pathway for butyrate production FIGS. 2B and 2C depict two schematics of two different butyrate producing circuits (found in SYN-503 and SYN-504), both under the control of a tetracycline inducible promoter. FIG. 2D depicts a schematic of a third butyrate gene cassette (found in SYN-505) under the control of a tetracycline inducible promoter. SYN-503 comprises a bdc2 butyrate cassette under control of tet promoter on a plasmid. A “bdc2 cassette” or “bdc2 butyrate cassette” refres to a butyrate producing cassette that comprises at least the following genes: bcd2, etfB3, etfA3, hbd, crt2, pbt, and buk genes. SYN-504 comprises a ter butyrate cassette (ter gene replaces the bcd2, etfB3, and etfA3 genes) under control of tet promoter on a plasmid. A “ter cassette” or “ter butyrate cassette” refers to a butyrate producing cassette that comprises at least the following genes: ter, thiA1, hbd, crt2, pbt, buk. SYN-505 comprises a tesB butyrate cassette (ter gene is present and tesB gene replaces the pbt gene and the buk gene) under control of tet promoter on a plasmid. A “tes or tesB cassette or “tes or tesB butyrate cassette” refers to a butyrate producing cassette that comprises at least ter, thiA1, hbd, crt2, and tesB genes. An alternative butyrate cassette of the disclosure comprises at least bcd2, etfB3, etfA3, thiA1, hbd, crt2, and tesB genes. In some embodiments, the tes or tesB cassette is under control of an inducible promoter other than tetracycline. Exemplary inducible promoters which may control the expression of the tesB cassette include oxygen level-dependent promoters (e.g., FNR-inducible promoter), promoters induced by HE-specific molecules or metabolites indicative of liver damage (e.g., bilirubin), promoters induced by inflammation or an inflammatory response (RNS, ROS promoters), and promoters induced by a metabolite that may or may not be naturally present (e.g., can be exogenously added) in the gut, e.g., arabinose and tetracycline.

[0014] FIG. 3 depicts the gene organization of exemplary engineered bacteria of the disclosure and their induction under anaerobic or inflammatory conditions for the production of butyrate. FIGS. 3A and 3B depict the gene organization of an exemplary recombinant bacterium of the invention and its induction under low-oxygen conditions. FIG. 3A depicts relatively low butyrate production under aerobic conditions in which oxygen (O2) prevents (indicated by “X”) FNR (grey boxed “FNR”) from dimerizing and activating the FNR-responsive promoter (“FNR promoter”). Therefore, none of the butyrate biosynthesis enzymes (bcd2, etfB3, etfA3, thiA1, hbd, crt2, pbt, and buk; black boxes) is expressed. FIG. 3B depicts increased butyrate production under low-oxygen conditions due to FNR dimerizing (two grey boxed “FNR”s), binding to the FNR-responsive promoter, and inducing expression of the butyrate biosynthesis enzymes, which leads to the production of butyrate. FIGS. 3C and 3D depict the gene organization of an exemplary recombinant bacterium of the invention and its derepression in the presence of nitric oxide (NO). In FIG. 3C, in the absence of NO, the NsrR transcription factor (gray circle, “NsrR”) binds to and represses a corresponding regulatory region. Therefore, none of the butyrate biosynthesis enzymes (bcd2, etfB3, etfA3, thiA1, hbd, crt2, pbt, buk; black boxes) is expressed. In FIG. 3D, in the presence of NO, the NsrR transcription factor interacts with NO, and no longer binds to or represses the regulatory sequence. This leads to expression of the butyrate biosynthesis enzymes (indicated by gray arrows and black squiggles) and ultimately to the production of butyrate. FIGS. 3E and F depict the gene organization of an exemplary recombinant bacterium of the invention and its induction in the presence of H202. In FIG. 3E, in the absence of H2O2, the OxyR transcription factor (gray circle, “OxyR”) binds to, but does not induce, the oxyS promoter. Therefore, none of the butyrate biosynthesis enzymes (bcd2, etfB3, etfA3, thiA1, hbd, crt2, pbt, buk; black boxes) is expressed. In FIG. 3F, in the presence of H2O2, the OxyR transcription factor interacts with H2O2 and is then capable of inducing the oxyS promoter. This leads to expression of the butyrate biosynthesis enzymes (indicated by gray arrows and black squiggles) and ultimately to the production of butyrate.

[0015] FIG. 4 depicts the gene organization of exemplary recombinant bacteria of the disclosure and their induction under anaerobic or inflammatory conditions for the production of butyrate. FIGS. 4A and 4B depict the gene organization of an exemplary recombinant bacterium of the invention and its induction under low-oxygen conditions. FIG. 4A depicts relatively low butyrate production under aerobic conditions in which oxygen (0₂) prevents (indicated by “X”) FNR (grey boxed “FNR”) from dimerizing and activating the FNR-responsive promoter (“FNR promoter”). Therefore, none of the butyrate biosynthesis enzymes (ter, thiA1, hbd, crt2, pbt, and buk; black boxes) is expressed. FIG. 4B depicts increased butyrate production under low-oxygen conditions due to FNR dimerizing (two grey boxed “FNR”s), binding to the FNR-responsive promoter, and inducing expression of the butyrate biosynthesis enzymes, which leads to the production of butyrate. FIGS. 4C and 4D depict the gene organization of another exemplary recombinant bacterium of the invention and its derepression in the presence of NO. In FIG. 4C, in the absence of NO, the NsrR transcription factor (gray circle, “NsrR”) binds to and represses a corresponding regulatory region. Therefore, none of the butyrate biosynthesis enzymes (ter, thiA1, hbd, crt2, pbt, buk; black boxes) is expressed. In FIG. 4D, in the presence of NO, the NsrR transcription factor interacts with NO, and no longer binds to or represses the regulatory sequence. This leads to expression of the butyrate biosynthesis enzymes (indicated by gray arrows and black squiggles) and ultimately to the production of butyrate. FIGS. 4E and 4F depict the gene organization of another exemplary recombinant bacterium of the invention and its induction in the presence of H₂O₂. In FIG. 4E, in the absence of H₂O₂, the OxyR transcription factor (gray circle, “OxyR”) binds to, but does not induce, the oxyS promoter. Therefore, none of the butyrate biosynthesis enzymes (ter, thiA1, hbd, crt2, pbt, buk; black boxes) is expressed. In FIGS. 4F, in the presence of H₂O₂, the OxyR transcription factor interacts with H₂O₂ and is then capable of inducing the oxyS promoter. This leads to expression of the butyrate biosynthesis enzymes (indicated by gray arrows and black squiggles) and ultimately to the production of butyrate.

[0016] FIG. 5 depicts the gene organization of exemplary recombinant bacteria of the disclosure and their induction under anaerobic or inflammatory conditions for the production of butyrate. FIGS. 5A and 5B depict the gene organization of an exemplary recombinant bacterium of the invention and its induction under low-oxygen conditions. FIG. 5A depicts relatively low butyrate production under aerobic conditions in which oxygen (O₂) prevents (indicated by “X”) FNR (grey boxed “FNR”) from dimerizing and activating the FNR-responsive promoter (“FNR promoter”). Therefore, none of the butyrate biosynthesis enzymes (ter, thiA1, hbd, crt2, and tesB; black boxes) is expressed. FIG. 5B depicts increased butyrate production under low-oxygen conditions due to FNR dimerizing (two grey boxed “FNR”s), binding to the FNR-responsive promoter, and inducing expression of the butyrate biosynthesis enzymes, which leads to the production of butyrate. FIGS. 5C and 5D depict the gene organization of another exemplary recombinant bacterium of the invention and its derepression in the presence of NO. In FIG. 5C, in the absence of NO, the NsrR transcription factor (gray circle, “NsrR”) binds to and represses a corresponding regulatory region. Therefore, none of the butyrate biosynthesis enzymes (ter, thiA1, hbd, crt2, tesB; black boxes) is expressed. In FIG. 5D, in the presence of NO, the NsrR transcription factor interacts with NO, and no longer binds to or represses the regulatory sequence. This leads to expression of the butyrate biosynthesis enzymes (indicated by gray arrows and black squiggles) and ultimately to the production of butyrate. FIGS. 5E and 5F depict the gene organization of another exemplary recombinant bacterium of the invention and its induction in the presence of H₂O₂. In FIG. 5E, in the absence of H₂O₂, the OxyR transcription factor (gray circle, “OxyR”) binds to, but does not induce, the oxyS promoter. Therefore, none of the butyrate biosynthesis enzymes (ter, thiA1, hbd, crt2, tesB; black boxes) is expressed. In FIGS. 5F, in the presence of H₂O₂, the OxyR transcription factor interacts with H₂O₂ and is then capable of inducing the oxyS promoter. This leads to expression of the butyrate biosynthesis enzymes (indicated by gray arrows and black squiggles) and ultimately to the production of butyrate.

[0017] FIG. 6 depicts a graph of butyrate production using the circuits shown in FIG. 48. Cells were grown in M9 minimal media containing 0.2% glucose and induced with ATC at early log phase. As seen in FIG. 6A, similar amounts of butyrate were produced for each construct under aerobic vs anaerobic conditions. The ter strain produces more butyrate overall. pLogic031 comprises (bdc2 butyrate cassette under control of tet promoter on a plasmid) and pLogic046 comprises (ter butyrate cassette under control of tet promoter on a plasmid). FIG. 6B depicts butyrate production of pLogic046 (ter butyrate cassette under control of tet promoter on a plasmid)) and a Nissle strain comprising plasmid pLOGIC046-delta pbt.buk/tesB+, an ATC-inducible ter-comprising butyrate construct with a deletion in the pbt-buk genes and their replacement with the tesB gene. The tesB construct results in greater butyrate production.

[0018] FIG. 7 depicts a graph of butyrate production using different butyrate-producing circuits comprising a nuoB gene deletion. Strains depicted are SYN-503, SYN-504, SYN-510 (SYN-510 is the same as SYN-503 except that it further comprises a nuoB deletion), and SYN-511 (SYN-511 is the same as SYN-504 except that it further comprises a nuoB deletion). The NuoB gene deletion results in greater levels of butyrate production as compared to a wild-type parent control in butyrate producing strains. NuoB is a main protein complex involved in the oxidation of NADH during respiratory growth. In some embodiments, preventing the coupling of NADH oxidation to electron transport increases the amount of NADH being used to support butyrate production.

[0019] FIG. 8A depicts a schematic of a butyrate producing circuit under the control of an FNR promoter. FIG. 8B depicts a bar graph of anaerobic induction of butyrate production. FNR-responsive promoters were fused to butyrate cassettes containing either the bcd or ter circuits. Transformed cells were grown in LB to early log and placed in anaerobic chamber for 4 hours to induce expression of butyrate genes. Cells were washed and resuspended in minimal media w/ 0.5% glucose and incubated microaerobically to monitor butyrate production over time. SYN-501 led to significant butyrate production under anaerobic conditions.

[0020] FIG. 9 depicts butyrate production by genetically engineered Nissle comprising the pLogic031-nsrR-norB-butyrate construct or the pLogic046-nsrR-norB-butyrate construct, which produce more butyrate as compared to wild-type Nissle.

[0021] FIG. 10 depicts a scatter graph of butyrate concentrations in the feces of mice gavaged with either H2O, 100 mM butyrate in H20, streptomycin resistant Nissle control or SYN501 comprising a PydfZ-ter ->pbt-buk butyrate plasmid. Significantly greater levels of butyrate were detected in the feces of the mice gavaged with SYN501 as compared mice gavaged with the Nissle control or those given water only. Levels are close to 2 mM and higher than the levels seen in the mice fed with H2O2O (+) 200 mM butyrate.

[0022] FIG. 11 depicts a bar graph showing butyrate concentrations produced in vitro by strains comprising chromsolmally integrated butyrate copies as compared to plasmid cpopies. Integrated butyrate strains, SYN1001 and SYN1002 gave comparable butyrate production to the plasmid strain SYN501.

[0023] FIG. 12 depicts a bar graph comparing butyrate concentrations produced in vitro by the butyrate cassette plasmid strain SYN501 as compared to Clostridia butyricum MIYARISAN (a Japanese probiotic strain), Clostridium tyrobutyricum VPI 5392 (Type Strain), and Clostridium butyricum NCTC 7423 (Type Strain) under aerobic and anaerobic conditions at the indicated timepoints. The Nissle strain comprising the butyrate cassette produces butyrate levels comparable to Clostridium spp. in RCM media.

[0024] FIG. 13 depicts a schematic illustrating a strategy for increasing butyrate and acetate production in engineered bacteria. Aerobic metabolism through the citric acid cycle (TCA cycle) (crossed out) is inactive in the anaerobic environment of the colon. E. coli makes high levels of acetate as an end production of fermentation. To improve acetate production, while still maintaining highlevels of butyrate production, targeted deletion can be introduced to prevent the production of unnecessary metabolic fermentative byproducts (thereby simultaneously increasing butyrate and acetate production). Non-limiting examples of competing routes (shown in in rounded boxes) are frdA (converts phosphoenolpyruvate to succinate), ldhA (converts pyruvate to lactate) and adhE (converts Acetyl-CoA to Ethanol). Deletions of interest therefore include deletion of adhE, ldh, and frd. Thus, in certain embodiments, the genetically engineered bacteria further comprise mutations and/or deletions in one or more of frdA, ldhA, and adhE.

[0025] FIG. 14A and FIG. 14B depict bar graphs showing Acetate/Butyrate production in 0.5% glucose MOPS (pH6.8) (FIG. 14A) and Acetate/Butyrate production in 0.5% glucuronic acid MOPS (pH6.3) (FIG. 14B). Deletions in endogenous adhE (Aldehyde-alcohol dehydrogenase) and ldh (lactate dehydrogenase) were introduced into Nissle strains with either integrated FNRS ter-tesB or FNRS-ter-pbt-buk butyrate cassettes.

[0026] FIG. 15A and FIG. 15B depicts the gene organization of an exemplary engineered bacterium of the invention and its induction under low-oxygen conditions for the production of propionate. FIG. 15A depicts relatively low propionate production under aerobic conditions in which oxygen (O₂) prevents (indicated by “X”) FNR (grey boxed “FNR”) from dimerizing and activating the FNR-responsive promoter (“FNR promoter”). Therefore, none of the propionate biosynthesis enzymes (pct, lcdA, lcdB, lcdC, e0, acrB, acrC; black boxes) are expressed. FIG. 15B depicts increased propionate production under low-oxygen conditions due to FNR dimerizing (two grey boxed “FNR”s), binding to the FNR-responsive promoter, and inducing expression of the propionate biosynthesis enzymes, which leads to the production of propionate.

[0027] FIG. 16 depicts an exemplary propionate biosynthesis gene cassette.

[0028] FIG. 17A, FIG. 17B and FIG. 17C depict the gene organization of an exemplary engineered bacterium and its induction under low-oxygen conditions for the production of propionate. FIG. 17A depicts relatively low propionate production under aerobic conditions in which oxygen (O₂) prevents (indicated by “X”) FNR (grey boxed “FNR”) from dimerizing and activating the FNR-responsive promoter (“FNR promoter”). Therefore, none of the propionate biosynthesis enzymes (thrA, thrB, thrC, ilvA, aceE, aceF, 1pd; black boxes) are expressed. FIG. 17B depicts increased propionate production under low-oxygen conditions due to FNR dimerizing (two grey boxed “FNR”s), binding to the FNR-responsive promoter, and inducing expression of the propionate biosynthesis enzymes, which leads to the production of propionate. FIG. 17C depicts an exemplary propionate biosynthesis gene cassette.

[0029] FIG. 18A, FIG. 18B and FIG. 18C depict the gene organization of an exemplary engineered bacterium and its induction under low-oxygen conditions for the production of propionate. FIG. 18A depicts relatively low propionate production under aerobic conditions in which oxygen (O₂) prevents (indicated by “X”) FNR (grey boxed “FNR”) from dimerizing and activating the FNR-responsive promoter (“FNR promoter”). Therefore, none of the propionate biosynthesis enzymes (thrA, thrB, thrC, ilvA, aceE, aceF, 1pd, tesB; black boxes) are expressed. FIG. 18B depicts increased propionate production under low-oxygen conditions due to FNR dimerizing (two grey boxed “FNR”s), binding to the FNR-responsive promoter, and inducing expression of the propionate biosynthesis enzymes, which leads to the production of propionate.

[0030] FIG. 19 depicts a schematic of an exemplary propionate biosynthesis gene cassette.

[0031] FIG. 20 depicts a schematic of an exemplary propionate biosynthesis gene cassette.

[0032] FIG. 21 depicts a schematic of a genetically engineered sleeping beauty metabolic pathway from E. coli for propionate production. Glucose and glycerol dissimilation pathways are shown under microaerobic conditions. In vivo, e.g., in a mammal, glycerol is not a substrate, and therefore only the glucose pathway is utilized.

[0033] FIG. 22 depicts a propionate production strategy. FIG. 22A a schematic of a construct comprising the sleeping beauty mutase operon from E. coli under the control of a heterologous FnrS promoter. FIG. 22B depicts a bar graph of proprionate concentrations produced in vitro by the wild type E coli BW25113 strain and a BW25113 strain which comprises the endogenous SBM operon under the control of the FnrS promoter, as depicted in the schematic in FIG. 22A.

[0034] FIG. 23 depicts a schematic of a construct comprising GLP-1 (1-37) under the control of the FliC promoter and 5′UTR containing the N-terminal flagellar secretion signal for secretion.

[0035] FIG. 24A, FIG. 24B, FIG. 24C, and FIG. 24D depict schematics of the organization of exemplary GLP-1 secretion constructs with phoA (FIG. 24A and FIG. 24B) or OmpA (FIG. 24C and FIG. 24D) secretion tags. Three different RBS binding sites, 20K (FIG. 24A and FIG. 24C), 100K (FIG. 24B), and 67K (FIG. 24D) with varying strength (20<67<100) are used. In some embodiments, the Tet inducible promoter and the TetR sequence is replaced by a different inducible promoter system or a constitutive promoter in these constructs. In some embodiments, the background of the strain which contains these constructs and from which GLP-1 is secreted comprises a deletion or mutation in 1pp. FIG. 24A depicts a schematic of a GLP-1 secretion construct which is expressed by the genetically engineered bacteria and comprises TetR-pTet-20K RBS -PhoA-Glp1. FIG. 24B depicts a schematic of a GLP-1 secretion construct which is expressed by the genetically engineered bacteria and comprises TetR-pTet-100K RBS -PhoA-Glp1. FIG. 24C depicts a schematic of a GLP-1 secretion construct which is expressed by the genetically engineered bacteria and comprises TetR-pTet-20K RBS -OmpF-Glp1. FIG. 24D depicts a schematic of a GLP-1 secretion construct which is expressed by the genetically engineered bacteria and comprisesTetR-pTet-67K RBS -OmpF-Glp1.

[0036] FIG. 25A and FIG. 25B depict schematics of the genetically engineered strains SYN2627 (comprising TetR-pTet-20K RBS -PhoA-G1p1) and SYN2643 (comprising TetR-pTet-20K RBS -PhoA-G1p1). Both strains comprise a deletion or mutation in 1pp. FIG. 25C depicts a bar graph showing the intracellular and secreted levels of GLP-1 as detected by ELISA assay for strains SYN2627 and SYN2643.

[0037] FIG. 26A and FIG. 26B depict line graphs of ELISA results. FIG. 26A depicts a line graph, showing an phopho-STAT3 (Tyr705) ELISA conducted on extracts from serum-starved Colo205 cells treated with supernatants from engineered bacteria comprising a PAL deletion and an integrated construct encoding hIL-22 with a phoA secretion tag. The data demonstrate that hIL-22 secreted from the engineered bacteria is functionally active. FIG. 26B depicts a line graph, showing an phopho-STAT3 (Tyr705) ELISA showing a antibody completion assay. Extracts from Colo205 cells were treated with the bacterial supernatants from the IL-22 overexpressing strain preincubated with increasing concentrations of neutralizing anti-IL-22 antibody. The data demonstrated that phospho-Stat3 signal induced by the secreted hIL-22 is competed away by the hIL-22 antibody MAB7821.

[0038] FIG. 27 depicts bile salt metabolism. Bile salts are synthesized from cholesterol in the liver and stored in the gallbladder. After release into the duodenum, microbial bile salt hydrolase activity in the small intestine deconjugates the glycine or taurine molecules to produce primary bile acids (also known as unconjugated bile acids). Most bile acids are reabsorbed into the enterohepatic portal system, but some enter the large intestine where they are further metabolized by microbial 7α-dehydroxylase to produce secondary bile acids. Excess bile acids are also lost in the stool (200 mg-600 mg per day).

[0039] FIG. 28 depicts the structure of bile salts and the location at which bile salt hydrolase enzymes deconjugate the bile salts. BSH activity has been detected in Lactobacillus spp, Bifidobacterium spp, Enterococcus spp, Clostridium spp, and Bacteroides spp. BSH positive bacteria are gram positive with the exception of two Bacteroides strains. BSH in has been detected in pathogenic bacteria, e.g., Listeria monocytogenes and Enterococcus feacalis. E. coli does not demonstrate BSH actvity nor contain bsh homolog in genome

[0040] FIG. 29 depicts the state of one non-limiting embodiment of the bile salt hydrolase enzyme construct under inducing conditions. Expression of the bile salt hydrolase enzyme and a bile salt transporter are both induced by the FNR promoter in the absence of oxygen. The thyA gene has been mutated in the E. coli Nissle genome, so thymidine must be supplied in the culture medium to support growth. The recombinant bacterial cell may further comprise an auxotrophic mutation, a type III secretion system, and/or a kill switch, as further described herein.

[0041] FIG. 30 depicts schematic of the E. coli tryptophan synthesis pathway, including genes, enzymes, and reactions involved. The seven genes, or genetic segments, seven enzymes, or enzyme domains, and seven reactions, involved in tryptophan formation are shown. Only one of the reactions is reversible. The products of four other pathways contribute carbon and/or nitrogen during tryptophan formation. Two of the tryptophan pathway enzymes often function as polypeptide complexes: anthranilate synthase, consisting of the TrpG and TrpE polypeptides, and tryptophan synthase, consisting of the TrpB and TrpA polypeptides.

[0042] FIG. 31 depicts one embodiment of the disclosure in which the E. coli TRP synthesis enzymes are expressed from a construct under the control of a tetracycline inducible system.

[0043] FIG. 32 depicts a schematic of tryptophan metabolism in humans. The abbreviations for the enzymes are as follows: 3-HAO: 3-hydroxyl-anthranilate 3,4-dioxidase; AAAD: aromatic-amino acid decarboxylase; ACMSD, alpha-amino-beta-carboxymuconate-epsilon-semialdehyde decarboxylase; HIOMT, hydroxyl-O-methyltransferase; IDO, indoleamine 2,3-dioxygenase; KAT, kynurenine amino transferases I-III; KMO: kynurenine 3-monooxygenase; KYNU, kynureninase; NAT, N-acetyltransferase; TDO, tryptophan 2,3-dioxygenase; TPH, tryptophan hydroxylase; QPRT, quinolinic acid phosphoribosyl transferase. In certain embodiments of the disclosure, the genetically engineered bacteria comprise gene cassettes comprising one or more of the tryptophan metabolism enzymes depicted in FIG. 32, or bacterial functional homologs thereof. In certain embodiments of the disclosure, the genetically engineered bacteria comprise gene cassettes which produce one or more of the tryptophan metabolites depicted in FIG. 32. In certain embodiments, the one or more cassettes are on a plasmid; in other embodiments, the cassettes are integrated into the genome. In certain embodiments, the one or more cassettes are under the control of inducible promoters which are induced under low-oxygen conditions, in the presence of certain molecules or metabolites, in the presence of molecules or metabolites associated with liver damage, inflammation or an inflammatory response, or in the presence of some other metabolite that may or may not be present in the gut, such as arabinose.

[0044] FIG. 33 depicts a schematic of molecular mechanisms of action of indole and its metabolites on host physiology and disease. Tryptophan catabolized by bacteria to yield indole and other indole metabolites, e.g., Indole-3-propionate (IPA) and Indole-3-aldehyde (I3A), in the gut lumen. IPA acts on intestinal cells via pregnane X receptors (PXR) to maintain mucosal homeostasis and barrier function. I3A acts on the aryl hydrocarbon receptor (AhR) found on intestinal immune cells and promotes IL-22 production. Activation of AhR plays a crucial role in gut immunity, such as in maintaining the epithelial barrier function and promoting immune tolerance to promote microbial commensalism while protecting against pathogenic infections. Indole has a number of roles, such as a signaling molecule to intestinal L cells to produce glucagon-like protein 1 (GLP-1) or as a ligand for AhR (Zhang et al. Genome Med. 2016; 8: 46).

[0045] FIG. 34 depicts a schematic of the trypophan metabolic pathway. Host and microbiota metabolites with AhR agonistic activity are in in diamond and circled, respectively (see, e.g., Lamas et al., CARD9 impacts colitis by altering gut microbiota metabolism of tryptophan into aryl hydrocarbon receptor ligands; Nature Medicine 22, 598-605 (2016). In certain embodiments of the disclosure, the genetically engineered bacteria comprise gene cassettes comprising one or more of the bacterial tryptophan metabolism enzymes which catalyze the reactions shown in FIG. 34. In certain embodiments, the genetically engineered bacteria comprise one or more gene cassettes which produce one or more of the metabolites depicted in FIG. 34, including but not limited to, kynurenine, indole-3-aldehyde, indole-3-acetic acid, and/or indole-3 acetaldehyde. In certain embodiments, the one or more cassettes are on a plasmid; in other embodiments, the cassettes are integrated into the genome. In certain embodiments the one or more cassettes are under the control of inducible promoters which are induced under low-oxygen conditions, in the presence of certain molecules or metabolites, in the presence of molecules or metabolites associated with liver damage, inflammation or an inflammatory response, or in the presence of some other metabolite that may or may not be present in the gut, such as arabinose. In certain embodiments the one or more cassettes are under the control of constitutive promoters.

[0046] FIG. 35A depicts a schematic of the bacterial tryptophan metabolism, as described, e.g., in Enzymes are numbered as follows 1) Trp 2,3 dioxygenase (EC 1.13.11.11); 2) kynurenine formidase (EC 3.5.1.49); 3) kynureninase (EC 3.7.1.3); 4) tryptophanase (EC 4.1.99.1); 5) Trp aminotransferase (EC 2.6.1.27); 6) indole lactate dehydrogenase (EC1.1.1.110); 7) Trp decarboxylase (EC 4.1.1.28); 8) tryptamine oxidase (EC 1.4.3.4); 9) Trp side chain oxidase (EC 4.1.1.43); 10) indole acetaldehyde dehydrogenase (EC 1.2.1.3); 11) indole acetic acid oxidase; 13) Trp 2-monooxygenase (EC 1.13.12.3); and 14) indole acetamide hydrolase (EC 3.5.1.0). The dotted lines (-) indicate a spontaneous reaction. In certain embodiments of the disclosure, the genetically engineered bacteria comprise gene cassettes comprising one or more of the bacterial tryptophan metabolism enzymes depicted in FIG. 35. In certain embodiments, the genetically engineered bacteria comprise one or more gene cassettes which produce one or more of the metabolites depicted in FIG. 35. In certain embodiments, the one or more cassettes are on a plasmid; in other embodiments, the cassettes are integrated into the genome. In certain embodiments, the one or more cassettes are under the control of inducible promoters which are induced under low-oxygen conditions, in the presence of certain molecules or metabolites, in the presence of molecules or metabolites associated with liver damage, inflammation or an inflammatory response, or in the presence of some other metabolite that may or may not be present in the gut, such as arabinose. In certain embodiments the one or more cassettes are under the control of constitutive promoters. FIG. 35B Depicts a schematic of tryptophan derived pathways. Known AHR agonists are with asterisk. Abbreviations are as follows. Trp: Tryptophan; TrA: Tryptamine; IAAld: Indole-3-acetaldehyde; IAA: Indole-3-acetic acid; FICZ: 6-formylindolo(3,2-b)carbazole; IPyA: Indole-3-pyruvic acid; IAM: Indole-3-acetamine; IAOx: Indole-3-acetaldoxime; IAN: Indole-3-acetonitrile; N-formyl Kyn: N-formylkynurenine; Kyn:Kynurenine; KynA: Kynurenic acid; I3C: Indole-3-carbinol; IAld: Indole-3-aldehyde; DIM: 3,3′-Diindolylmethane; ICZ: Indolo(3,2-b)carbazole.

[0047] FIG. 36A, FIG. 36B, FIG. 36C, and FIG. 36D depicts schematics of exemplary embodiments of the disclosure, in which the genetically engineered bacteria comprise circuits for the production of tryptophan. Any of the gene(s), gene sequence(s) and/or gene circuit(s) or cassette(s) are optionally expressed from an inducible promoter. In certain embodiments the one or more cassettes are under the control of constitutive promoters. Exemplary inducible promoters which may control the expression of the gene(s), gene sequence(s) and/or gene circuit(s) or cassette(s) include oxygen level-dependent promoters (e.g., FNR-inducible promoter), promoters induced by inflammation or an inflammatory response (RNS, ROS promoters), and promoters induced by a metabolite that may or may not be naturally present (e.g., can be exogenously added) in the gut, e.g., arabinose and tetracycline. The bacteria may also include an auxotrophy, e.g., deletion of thyA (Δ thyA; thymidine dependence). FIG. 36A shows a schematic depicting an exemplary Tryptophan circuit. Tryptophan is produced from its precursor, chorismate, through expression of the trpE, trpG-D (also referred to as trpD), trpC-F (also referred to as trpC), trpB and trpA genes. Optional knockout of the tryptophan repressor trpR is also depicted. Optional production of chorismate through expression of aroG/F/H and aroB, aroD, aroE, aroK and aroC genes is also shown. The bacteria may optionally also include gene sequence(s) for the expression of YddG, which functions as a tryptophan exporter. The bacteria may optionally also comprise one or more gene sequence(s) depicted or described in FIG. 36B, and/or FIG. 36C, and/or FIG. 36D. FIG. 36B depicts a tryptophan producing strain, in which tryptophan is produced from the chorismate precursor through expression of the trpE, trpG-D, trpC-F, trpB and trpA genes. AroG and TrpE are replaced with feedback resistant versions to improve tryptophan production. Optionally, bacteria may comprise any of the transporters and/or additional tryptophan circuits depicted in FIG. 36A and/or described in the description of FIG. 36A. The bacteria may optionally also comprise one or more gene sequence(s) depicted or described in FIG. 36C, and/or FIG. 36D. Optionally, trpR and/or the tnaA gene (encoding a tryptophanase converting tryptophan into indole) are deleted to further increase levels of tryptophan produced. FIG. 36C depicts a tryptophan producing strain, in which tryptophan is produced from the chorismate precursor through expression of the trpE, trpG-D, trpC-F, trpB and trpA genes. AroG and TrpE are replaced with feedback resistant versions to improve tryptophan production. The strain further comprises either a wild type or a feedback resistant SerA gene. Escherichia coli serA-encoded 3-phosphoglycerate (3PG) dehydrogenase catalyzes the first step of the major phosphorylated pathway of L-serine (Ser) biosynthesis. This step is an oxidation of 3PG to 3-phosphohydroxypyruvate (3PHP) with the concomitant reduction of NAD1 to NADH. E. coli uses one serine for each tryptophan produced. As a result, by expressing serA, tryptophan production is improved. Optionally, bacteria may comprise any of the transporters and/or additional tryptophan circuits depicted in FIG. 36A and/or described in the description of FIG. 36A. The bacteria may optionally also comprise one or more gene sequence(s) depicted or described in FIG. 36B, and/or FIG. 36D. Optionally, Trp Repressor and/or the tnaA gene are deleted to further increase levels of tryptophan produced. The bacteria may optionally also include gene sequence(s) for the expression of YddG, which functions as a tryptophan exporter. FIG. 36D depicts a non-limiting example of a tryptophan producing strain, in which tryptophan is produced from the chorismate precursor through expression of the trpE, trpG-D, trpC-F, trpB and trpA genes. AroG and TrpE are replaced with feedback resistant versions to improve tryptophan production. The strain further optionally comprises either a wild type or a feedback resistant SerA gene. Optionally, bacteria may comprise any of the transporters and/or additional tryptophan circuits depicted in FIG. 36A and/or described in the description of FIG. 36A. The bacteria may optionally also comprise one or more gene sequence(s) depicted or described in FIG. 36B, and/or FIG. 36C. Optionally, Trp Repressor and/or the tnaA gene are deleted to further increase levels of tryptophan produced. The bacteria may optionally also include gene sequence(s) for the expression of YddG, which functions as a tryptophan exporter. Optionally, the bacteria may also comprise a deletion in PheA, which prevents conversion of chorismate into phenylalanine and thereby promotes the production of anthranilate and tryptophan. FIG. 37A, FIG. 37B, FIG. 37D, FIG. 37D, FIG. 37E, FIG. 37F, FIG. 37G, and FIG. 37H depict schematics of non-limiting examples of embodiments of the disclosure. In all embodiments, optionally gene(s) which encode exporters may also be included. FIG. 37A depicts one embodiment of the disclosure, in which the genetically engineered bacteria produce tryptamine from tryptophan. In certain embodiments the one or more cassettes are under the control of inducible promoters. In certain embodiments the one or more cassettes are under the control of constitutive promoters. The bacteria may comprise any of the transporters and/or tryptophan circuits depicted and described in FIG. 36A and/or and/or FIG. 36B, and/or FIG. 36C, and/or FIG. 36D for the production of tryptophan. Alternatively, optionally, tryptophan can be imported through a transporter. In addition, the genetically engineered bacteria comprise a circuit for Tryptophan decarboxylase, e.g., from Catharanthus roseus, which converts tryptophan to tryptamine, e.g., under the control of an inducible promoter e.g., an FNR promoter. FIG. 37B depicts one embodiment of the disclosure, in which the genetically engineered bacteria produce indole-3-acetaldehyde and FICZ from tryptophan. The bacteria may comprise any of the transporters and/or tryptophan circuits depicted and described in FIG. 36A and/or FIG. 36B, and/or FIG. 36C, and/or FIG. 36D for the production of tryptophan. Alternatively, optionally, tryptophan can be imported through a transporter. In addition, the genetically engineered bacteria comprise a circuit for aro9 (L-tryptophan aminotransferase, e.g., from S. cerevisae) or aspC (aspartate aminotransferase, e.g., from E. coli , or taal (L-tryptophan-pyruvate aminotransferase, e.g., from Arabidopsis thaliana) or sta0 (L-tryptophan oxidase, e.g., from streptomyces sp. TP-A0274) or trpDH (Tryptophan dehydrogenase, e.g., from Nostoc punctiforme NIES-2108) and ipdC (Indole-3-pyruvate decarboxylase, e.g., from Enterobacter cloacae) which together produce indole-3-acetaldehyde and FICZ from tryptophan, e.g., under the control of an inducible promoter e.g., an FNR promoter. FIG. 37C depicts one embodiment of the disclosure, in which the genetically engineered bacteria produce indole-3-acetaldehyde and FICZ from tryptophan. The bacteria may comprise any of the transporters and/or tryptophan circuits depicted and described in FIG. 36A and/or and/or FIG. 36B, and/or FIG. 36C, and/or FIG. 36D for the production of tryptophan. Alternatively, optionally, tryptophan can be imported through a transporter. In addition, the genetically engineered bacteria comprise a circuit comprising tdc (Tryptophan decarboxylase, e.g., from Catharanthus roseus and/or Clostridium sporogenes), and tynA (Monoamine oxidase, e.g., from E. coli ), which converts tryptophan to indole-3-acetaldehyde and FICZ, e.g., under the control of an inducible promoter e.g., an FNR promoter. FIG. 37D depicts one embodiment of the disclosure, in which the genetically engineered bacteria produce indole-3-acetonitrile from tryptophan. The bacteria may comprise any of the transporters and/or tryptophan circuits depicted and described in FIG. 36A and/or and/or FIG. 36B, and/or FIG. 36C, and/or FIG. 36D for the production of tryptophan. Alternatively, optionally, tryptophan can be imported through a transporter. In addition, the genetically engineered bacteria comprise a circuit for cyp79B2, (tryptophan N-monooxygenase, e.g., from Arabidopsis thaliana) or cyp79B3 (tryptophan N-monooxygenase, e.g., from Arabidopsis thaliana), which together convert tryptophan to indole-3-acetonitrile, e.g., under the control of an inducible promoter e.g., an FNR promoter. FIG. 37E depicts one embodiment of the disclosure, in which the genetically engineered bacteria produce kynurenine from tryptophan. The bacteria may comprise any of the transporters and/or tryptophan circuits depicted and described in FIG. 36A and/or and/or FIG. 36B, and/or FIG. 36C, and/or FIG. 36D for the production of tryptophan. Alternatively, optionally, tryptophan can be imported through a transporter. In addition, the genetically engineered bacteria comprise a circuit comprising IDO1(indoleamine 2,3-dioxygenase, e.g., from homo sapiens or TDO2 (tryptophan 2,3-dioxygenase, e.g., from homo sapiens) or BNA2 (indoleamine 2,3-dioxygenase, e.g., from S. cerevisiae) and Afmid: Kynurenine formamidase, e.g., from mouse) or BNA3 (kynurenine--oxoglutarate transaminase, e.g., from S. cerevisae) which together convert tryptophan to kynurenine, e.g., under the control of an inducible promoter e.g., an FNR promoter. FIG. 37F depicts one embodiment of the disclosure, in which the genetically engineered bacteria produce kynureninic acid from tryptophan. The bacteria may comprise any of the transporters and/or tryptophan circuits depicted and described in FIG. 36A and/or and/or FIG. 36B, and/or FIG. 36C, and/or FIG. 36D for the production of tryptophan. Alternatively, optionally, tryptophan can be imported through a transporter. In addition, the genetically engineered bacteria comprise a circuit comprising IDO1(indoleamine 2,3-dioxygenase, e.g., from homo sapiens or TDO2 (tryptophan 2,3-dioxygenase, e.g., from homo sapiens) or BNA2 (indoleamine 2,3-dioxygenase, e.g., from S. cerevisiae) and Afmid: Kynurenine formamidase, e.g., from mouse) or BNA3 (kynurenine--oxoglutarate transaminase, e.g., from S. cerevisae) and GOT2 (Aspartate aminotransferase, mitochondrial, e.g.,from homo sapiens or AADAT (Kynurenine/alpha-amino adipate aminotransferase, mitochondrial, e.g., from homo sapiens), or CCLB1 (Kynurenine--oxoglutarate transaminase 1, e.g., from homo sapiens) or CCLB2 (kynurenine--oxoglutarate transaminase 3, e.g., from homo sapiens, which together produce kynureninic acid from tryptophan, under the control of an inducible promoter, e.g., an FNR promoter. FIG. 37G depicts one embodiment of the disclosure, in which the genetically engineered bacteria produce indole from tryptophan. The bacteria may comprise any of the transporters and/or tryptophan circuits depicted and described in FIG. 36A and/or and/or FIG. 36B, and/or FIG. 36C, and/or FIG. 36D for the production of tryptophan. Alternatively, optionally, tryptophan can be imported through a transporter. In addition, the genetically engineered bacteria comprise a circuit for tnaA (tryptophanase, e.g., from E. coli ), which converts tryptophan to indole, e.g., under the control of an inducible promoter e.g., an FNR promoter. FIG. 37H depicts one embodiment of the disclosure, in which the genetically engineered bacteria produce indole-3-carbinol, indole-3-aldehyde, 3,3′ diindolylmethane (DIM), indolo(3,2-b) carbazole (ICZ) from indole glucosinolate taken up through the diet. The genetically engineered bacteria comprise a circuit comprising pne2 (myrosinase, e.g., from Arabidopsis thaliana) under the control of an inducible promoter, e.g. an FNR promoter. The engineered bacterium shown in any of FIG. 37A, FIG. 37B, FIG. 37D, FIG. 37D, FIG. 37E, FIG. 37F, FIG. 37G and FIG. 37H may also have an auxotrophy, e.g., in one example, the thyA gene can be been mutated in the E. coli Nissle genome, so thymidine must be supplied in the culture medium to support growth.

[0048] FIG. 38A, FIG. 38B, FIG. 38C, FIG. 38D, and FIG. 38E depict schematics of exemplary embodiments of the disclosure, in which the genetically engineered bacteria convert tryptophan into indole-3-acetic acid. In certain embodiments, the one or more cassettes are under the control of inducible promoters. In certain embodiments, the one or more cassettes are under the control of constitutive promoters. In FIG. 38A, the optional circuits for tryptophan production are as depicted and described in FIG. 36A. The strain optionally comprises additional circuits as depicted and/or described in FIG. 36B and/or FIG. 36C and/or FIG. 36D. Alternatively, optionally, tryptophan can be imported through a transporter. In addition, the genetically engineered bacteria comprise a circuit comprising aro9 (L-tryptophan aminotransferase, e.g., from S. cerevisae) or aspC (aspartate aminotransferase, e.g., from E. coli , or taal (L-tryptophan-pyruvate aminotransferase, e.g., from Arabidopsis thaliana) or staO (L-tryptophan oxidase, e.g., from streptomyces sp. TP-A0274) or trpDH (Tryptophan dehydrogenase, e.g., from Nostoc punctiforme NIES-2108) and ipdC (Indole-3-pyruvate decarboxylase, e.g., from Enterobacter cloacae) and iad1 (Indole-3-acetaldehyde dehydrogenase, e.g., from Ustilago maydis) or AAO1 (Indole-3-acetaldehyde oxidase, e.g., from Arabidopsis thaliana) which together produce indole-3-acetic acid from tryptophan, e.g., under the control of an inducible promoter e.g., an FNR promoter. In FIG. 38B the optional circuits for tryptophan production are as depicted and described in FIG. 36A. The strain optionally comprises additional circuits as depicted and/or described in FIG. 36B and/or FIG. 36C and/or FIG. 36D. Alternatively, optionally, tryptophan can be imported through a transporter. In addition, the genetically engineered bacteria comprise a circuit comprising tdc (Tryptophan decarboxylase, e.g.,from Catharanthus roseus and/or Clostridium sporogenes) of tynA (Monoamine oxidase, e.g., from E. coli ) and or iad1 (Indole-3-acetaldehyde dehydrogenase, e.g., from Ustilago maydis) or AAO1 (Indole-3-acetaldehyde oxidase, e.g., from Arabidopsis thaliana), e.g., under the control of an inducible promoter e.g., an FNR promoter. In FIG. 38C the optional circuits for tryptophan production are as depicted and described in FIG. 36A. The strain optionally comprises additional circuits as depicted and/or described in FIG. 36B and/or FIG. 36C and/or FIG. 36D. Alternatively, optionally, tryptophan can be imported through a transporter. In addition, the genetically engineered bacteria comprise a circuit comprising aro9 (L-tryptophan aminotransferase, e.g., from S. cerevisae) or aspC (aspartate aminotransferase, e.g., from E. coli , or taal (L-tryptophan-pyruvate aminotransferase, e.g., from Arabidopsis thaliana) or staO (L-tryptophan oxidase, e.g., from streptomyces sp. TP-A0274) or trpDH (Tryptophan dehydrogenase, e.g., from Nostoc punctiforme NIES-2108) and yuc2 (indole-3-pyruvate monoxygenase, e.g., from Arabidopsis thaliana) e.g., under the control of an inducible promoter e.g., an FNR promoter. In FIG. 38D the optional circuits for tryptophan production are as depicted and described in FIG. 36A. The strain optionally comprises additional circuits as depicted and/or described in FIG. 36B and/or FIG. 36C and/or FIG. 36D. Alternatively, optionally, tryptophan can be imported through a transporter. In addition, the genetically engineered bacteria comprise a circuit comprising IaaM (Tryptophan 2-monooxygenase e.g., from Pseudomonas savastanoi) and iaaH (Indoleacetamide hydrolase, e.g., from Pseudomonas savastanoi), e.g., under the control of an inducible promoter e.g., an FNR promoter. In FIG. 38E the optional circuits for tryptophan production are as depicted and described in FIG. 36A. The strain optionally comprises additional circuits as depicted and/or described in FIG. 36B and/or FIG. 36C and/or FIG. 36D. Alternatively, optionally, tryptophan can be imported through a transporter. In addition, the genetically engineered bacteria comprise a circuit comprising cyp79B2 (tryptophan N-monooxygenase, e.g., from Arabidopsis thaliana) or cyp79B3 (tryptophan N-monooxygenase, e.g., from Arabidopsis thaliana and cyp71a13 (indoleacetaldoxime dehydratase, e.g., from Arabidopis thaliana) and nitl (Nitrilase, e.g., from Arabidopsis thaliana) and iaaH (Indoleacetamide hydrolase, e.g., from Pseudomonas savastanoi), e.g., under the control of an inducible promoter e.g., an FNR promoter. the engineered bacterium shown in any of FIG. 38A, FIG. 38B, FIG. 38C, FIG. 38D, and FIG. 38E may also have an auxotrophy, e.g., in one example, the thyA gene can be been mutated in the E. coli Nissle genome, so thymidine must be supplied in the culture medium to support growth. In FIG. 38F the optional circuits for tryptophan production are as depicted and described in FIG. 36A. The strain optionally comprises additional circuits as depicted and/or described in FIG. 36B and/or FIG. 36C and/or FIG. 36D. Alternatively, optionally, tryptophan can be imported through a transporter. Additionally, the strain comprises trpDH (Tryptophan dehydrogenase, e.g., from Nostoc punctiforme NIES-2108) and ipdC (Indole-3-pyruvate decarboxylase, e.g., from Enterobacter cloacae) which together produce indole-3-acetaldehyde and FICZ though an (indo1-3y1)pyruvate intermediate, and iadl (Indole-3-acetaldehyde dehydrogenase, e.g., from Ustilago maydis), which converts indole-3-acetaldehyde into indole-3-acetate.

[0049] FIG. 39A, FIG. 39B, and FIG. 39C depict schematics of exemplary embodiments of the disclosure, in which the genetically engineered bacteria comprise circuits for the production of tryptophan, tryptamine, indole acetic acid, and indole propionic acid. Any of the gene(s), gene sequence(s) and/or gene circuit(s) or cassette(s) are optionally expressed from an inducible promoter. In certain embodiments, the one or more cassettes are under the control of constitutive promoters. Exemplary inducible promoters which may control the expression of the gene(s), gene sequence(s) and/or gene circuit(s) or cassette(s) include oxygen level-dependent promoters (e.g., FNR-inducible promoter), promoters induced by inflammation or an inflammatory response (RNS, ROS promoters), and promoters induced by a metabolite that may or may not be naturally present (e.g., can be exogenously added) in the gut, e.g., arabinose and tetracycline. The bacteria may also include an auxotrophy, e.g., deletion of thyA (Δ thyA; thymidine dependence). FIG. 39A a depicts non-limiting example of a tryptamine producing strain. Tryptophan is optionally produced from chorismate precursor, and the strain optionally comprises circuits as depicted and/or described in FIG. 36A and/or FIG. 36B and/or FIG. 36C and/or FIG. 36D. Additionally, the strain comprises tdc (tryptophan decarboxylase, e.g., from Catharanthus roseus and/or Clostridium sporogenes), which converts tryptophan into tryptamine. FIG. 39B depicts a non-limiting example of an indole-3-acetate producing strain. Tryptophan is optionally produced from chorismate precursor, and the strain optionally comprises circuits as depicted and/or described in FIG. 36A and/or FIG. 36B and/or FIG. 36C and/or FIG. 36D. Additionally, the strain comprises trpDH (Tryptophan dehydrogenase, e.g., from Nostoc punctiforme NIES-2108) and ipdC (Indole-3-pyruvate decarboxylase, e.g., from Enterobacter cloacae) which together produce indole-3-acetaldehyde and FICZ though an (indo1-3y1)pyruvate intermediate, and iadl (Indole-3-acetaldehyde dehydrogenase, e.g., from Ustilago maydis), which converts indole-3-acetaldehyde into indole-3-acetate. FIG. 39C depicts a non-limiting example of an indole-3-propionate-producing strain. Tryptophan is optionally produced from chorismate precursor, and the strain optionally comprises circuits as depicted and/or described in FIG. 36A and/or FIG. 36B and/or FIG. 36C and/or FIG. 36D. Additionally, the strain comprises a circuit as described in FIG. 44, comprising trpDH (Tryptophan dehydrogenase, e.g., from Nostoc punctiforme NIES-2108, which produces (indol-3y1)pyruvate from tryptophan), fldA (indole-3-propionyl-CoA:indole-3-lactate CoA transferase, e.g., from Clostridium sporogenes, which converts converts indole-3-lactate and indol-3-propionyl-CoA to indole-3-propionic acid and indole-3-lactate-CoA), fldB and fldC (indole-3-lactate dehydratase e.g., from Clostridium sporogenes, which converts indole-3-lactate-CoA to indole-3-acrylyl-CoA) fldD and/or AcuI: (indole-3-acrylyl-CoA reductase, e.g., from Clostridium sporogenes and/or acrylyl-CoA reductase, e.g., from Rhodobacter sphaeroides, which convert indole-3-acrylyl-CoA to indole-3-propionyl-CoA). The circuits further comprise fldH/ and/or fldH2 (indole-3-lactate dehydrogenase 1 and/or 2, e.g., from Clostridium sporogenes), which converts (indol-3-yl)pyruvate into indole-3-lactate).

[0050] FIG. 40A and FIG. 40B depict schematics showing exemplary engineering strategies which can be employed for tryptophan production. FIG. 40A depicts a schematic showing intermediates in tryptophan biosynthesis and the gene products catalyzing the production of these intermediates. Phosphoenolpyruvate (PEP) and D-erythrose 4-phosphate (E4P) are used to generate 3-deoxy-D-arabino-heptulosonate 7-phosphate (DAHP). DHAP is catabolized to chorismate and then anthranilate, which is converted to tryptophan (Trp) by the tryptophan operon. Alternatively, chorismate can be used in the synthesis of tyrosine (Tyr) and/or phenylalanine (Phe). In the serine biosynthesis pathway, D-3-phosphoglycerate is converted to serine, which can also be a source for tryptophan biosynthesis. AroG AroF, AroH: DAHP synthase catalyzes an aldol reaction between phosphoenolpyruvate and D-erythrose 4-phosphate to generate 3-deoxy-D-arabino-heptulosonate 7-phosphate (DAHP). There are three isozymes of DAHP synthase, each specifically feedback regulated by tyrosine (AroF), phenylalanine (AroG) or tryptophan(AroH). AroB: Dehydroquinate synthase (DHQ synthase) is involved in the second step of the chorismate pathway, which leads to the biosynthesis of aromatic amino acids. DHQ synthase catalyzes the cyclization of 3-deoxy-D-arabino-heptulosonic acid 7-phosphate (DAHP) to dehydroquinate (DHQ). AroD: 3-Dehydroquinate dehydratase (DHQ dehydratase) is involved in the 3rd step of the chorismate pathway, which leads to the biosynthesis of aromatic amino acids. DHQ dehydratase catalyzes the conversion of DHQ to 3-dehydroshikimate and introduces the first double bond of the aromatic ring. AroE, YdiB: E. coli expresses two shikimate dehydrogenase paralogs, AroE and YdiB. Shikimate dehydrogenase is involved in the 4th step of the chorismate pathway, which leads to the biosynthesis of aromatic amino acids. This enzyme converts 3-dehydroshikimate to shikimate by catalyzing the NADPH linked reduction of 3-dehydro-shikimate. AroL/AroK: Shikimate kinase is involved in the fifth step of the chorismate pathway, which leads to the biosynthesis of aromatic amino acids. Shikimate kinase catalyzes the formation of shikimate 3-phosphate from shikimate and ATP. There are two shikimate kinase enzymes, I (AroK) and II (AroL). AroA: 3-Phosphoshikimate-1-carboxyvinyltransferase (EPSP synthase) is involved in the 6th step of the chorismate pathway, which leads to the biosynthesis of aromatic amino acids. EPSP synthase catalyzes the transfer of the enolpyruvoyl moiety from phosphoenolpyruvate to the hydroxyl group of carbon 5 of shikimate 3-phosphate with the elimination of phosphate to produce 5-enolpyruvoyl shikimate 3-phosphate (EPSP). AroC: Chorismate synthase (AroC) is involved in the 7th and last step of the chorismate pathway, which leads to the biosynthesis of aromatic amino acids. This enzyme catalyzes the conversion of 5-enolpyruvylshikimate 3-phosphate into chorismate, which is the branch point compound that serves as the starting substrate for the three terminal pathways of aromatic amino acid biosynthesis. This reaction introduces a second double bond into the aromatic ring system. TrpEDCAB (E coli trp operon): TrpE (anthranilate synthase) converts chorismate and L-glutamine into anthranilate, pyruvate and L-glutamate. Anthranilate phosphoribosyl transferase (TrpD) catalyzes the second step in the pathway of tryptophan biosynthesis. TrpD catalyzes a phosphoribosyltransferase reaction that generates N-(5′-phosphoribosyl)-anthranilate. The phosphoribosyl transferase and anthranilate synthase contributing portions of TrpD are present in different portions of the protein. Bifunctional phosphoribosylanthranilate isomerase/indole-3-glycerol phosphate synthase (TrpC) carries out the third and fourth steps in the tryptophan biosynthesis pathway. The phosphoribosylanthranilate isomerase activity of TrpC catalyzes the Amadori rearrangement of its substrate into carboxyphenylaminodeoxyribulose phosphate. The indole-glycerol phosphate synthase activity of TrpC catalyzes the ring closure of this product to yield indole-3-glycerol phosphate. The TrpA polypeptide (TSase α) functions as the a subunit of the tetrameric (α2-β2) tryptophan synthase complex. The TrpB polypeptide functions as the 0 subunit of the complex, which catalyzes the synthesis of L-tryptophan from indole and L-serine, also termed the β reaction. TnaA: Tryptophanase or tryptophan indole-lyase (TnaA) is a pyridoxal phosphate (PLP)-dependent enzyme that catalyzes the cleavage of L-tryptophan to indole, pyruvate and NH4+. PheA: Bifunctional chorismate mutase/prephenate dehydratase (PheA) carries out the shared first step in the parallel biosynthetic pathways for the aromatic amino acids tyrosine and phenylalanine, as well as the second step in phenylalanine biosynthesis. TyrA: Bifunctional chorismate mutase/prephenate dehydrogenase (TyrA) carries out the shared first step in the parallel biosynthetic pathways for the aromatic amino acids tyrosine and phenylalanine, as well as the second step in tyrosine biosynthesis. TyrB, ilvE, AspC: Tyrosine aminotransferase (TyrB), also known as aromatic-amino acid aminotransferase, is a broad-specificity enzyme that catalyzes the final step in tyrosine, leucine, and phenylalanine biosynthesis. TyrB catalyzes the transamination of 2-ketoisocaproate, p-hydroxyphenylpyruvate, and phenylpyruvate to yield leucine, tyrosine, and phenylalanine, respectively. TyrB overlaps with the catalytic activities of branched-chain amino-acid aminotransferase (IlvE), which also produces leucine, and aspartate aminotransferase, PLP-dependent (AspC), which also produces phenylalanine. SerA: D-3-phosphoglycerate dehydrogenase catalyzes the first committed step in the biosynthesis of L-serine. SerC: The serC-encoded enzyme, phosphoserine/phosphohydroxythreonine aminotransferase, functions in the biosythesis of both serine and pyridoxine, by using different substrates. Pyridoxal 5′-phosphate is a cofactor for both enzyme activities. SerB: Phosphoserine phosphatase catalyzes the last step in serine biosynthesis. Steps which are negatively regulated by the Trp Repressor (2), Tyr Repressor (1), or tyrosine (3), phenylalanine (4), or tryptophan (4) or positively regulated by trptophan (6) are indicated. FIG. 40B depicts a schematic showing exemplary engineering strategies which can improve tryptophan production. Each of these exemplary strategies can be used alone or two or more strategies can be combined to increase tryptophan production. Intervention points are in bold, italics and underlined. In one embodiment of the disclosure, bacteria are engineered to express a feedback resistant from of AroG (AroGfbr). In one embodiment, bacteria are engineered to express AroL. In one embodiment, bacteria are engineered to comprise one or more copies of a feedback resistant form of TrpE (TrpEfbr). In one embodiment, bacteria are engineered to comprise one or more additional copies of the Trp operon, e.g., TrpE, e.g. TrpEtbr, and/or TrpD, and/or TrpC, and/or TrpA, and/or TrpB. In one embodiment, endogenous TnaA is knocked out through mutation(s) and/or deletion(s). In one embodiment, bacteria are engineered to comprise one or more additional copies of SerA. In one embodiment, bacteria are engineered to comprise one or more additional copies of YddG, a tryptophan exporter. In one embodiment, endogenous PheA is knocked out through mutation(s) and/or deletion(s). In one embodiment, two or more of the strategies depicted in the schematic of FIG. 40B are engineered into a bacterial strain. Alternatively, other gene products in this pathway may be mutated or overexpressed.

[0051] FIG. 41A and FIG. 41B and FIG. 41C depict bar graphs showing tryptophan production by various engineered bacterial strains. FIG. 41A depicts a bar graph showing tryptophan production by various tryptophan producing strains. The data show expressing a feedback resistant form of AroG (AroG^{fbr}) is necessary to get tryptophan production. Additionally, using a feedback resistant trpE (trpE^{fbr}) has a positive effect on tryptophan production. FIG. 41B shows tryptophan production from a strain comprising a tet-trpE^{fbr}DCBA, tet-aroG^{fhr} construct, comparing glucose and glucuronate as carbon sources in the presence and absence of oxygen. It takes E. coli two molecules of phosphoenolpyruvate (PEP) to produce one molecule of tryptophan. When glucose is used as the carbon source, 50% of all available PEP is used to import glucose into the cell through the PTS system (Phosphotransferase system). Tryptophan production is improved by using a non-PTS sugar (glucuronate) aerobically. The data also show the positive effect of deleting tnaA (only at early time point aerobically). FIG. 41C depicts a bar graph showing improved tryptophan production by engineered strain comprising ΔtrpRΔtnaA, tet-trpE^{fbr}DCBA, tet-aroG^{fbr} through the addition of serine.

[0052] FIG. 42 depicts a bar graph showing a comparison in tryptophan production in strains SYN2126, SYN2323, SYN2339, SYN2473, and SYN2476. SYN2126 ΔtrpRΔtnaA. ΔtrpRΔtnaA, tet-aroGfbr. SYN2339 comprises ΔtrpRΔtnaA, tet-aroGfbr, tet-trpEtbrDCBA. SYN2473 comprises ΔtrpRΔtnaA, tet-aroGfbr-serA, tet-trpEfbrDCBA. SYN2476 comprises ΔtrpRΔtnaA, tet-trpEtbrDCBA. Results indicate that expressing aroG is not sufficient nor necessary under these conditions to get Trp production and that expressing serA is beneficial for tryptophan production.

[0053] FIG. 43 depicts a schematic of an indole-3-propionic acid (IPA) synthesis circuit. IPA produced by the gut microbiota has a significant positive effect on barrier integrity. IPA does not signal through AhR, but rather through a different receptor (PXR) (Venkatesh et al., Symbiotic Bacterial Metabolites Regulate Gastrointestinal Bardrier Function via the Xenobiotic Sensor PXR and Toll-like Receptor 4; Immunity 41, 296-310, Aug. 21, 2014). In some embodiments, IPA can be produced in a synthetic circuit by expressing two enzymes, a tryptophan ammonia lyase and an indole-3-acrylate reductase (e.g., Tryptophan ammonia lyase (WAL) (e.g., from Rubrivivax benzoatilyticus) and indole-3-acrylate reductase (e.g., from Clostridum botulinum). Tryptophan ammonia lyase converts tryptophan to indole-3-acrylic acid, and indole-3-acrylate reductase converts indole-3-acrylic acid into IPA. Without wishing to be bound by theory, no oxygen is needed for this reaction, allowing it to proceed under low or no oxygen conditions, e.g., as those found in the mammalian gut. In some embodiments, the genetically engineered bacteria further comprise one or more circuits for the production of tryptophan, e.g., as shown in FIG. 36 (A-D) and FIG. 40 and as described elsewhere herein. In some embodiments, AroG and/or TrpE are replaced with feedback resistant versions to improve tryptophan production in the genetically engineered bacteria. In some embodiments, trpR and/or the tnaA gene (encoding a tryptophanase converting tryptophan into indole) are deleted to further increase levels of tryptophan produced.

[0054] FIG. 44 depicts a schematic of indole-3-propionic acid (IPA), indole acetic acid (IAA), and tryptamine synthesis(TrA) circuits. Enzymes are as follows : 1. TrpDH: tryptophan dehydrogenase, e.g., from from Nostoc punctiforme NIES-2108; FldH1/FldH2: indole-3-lactate dehydrogenase, e.g., from Clostridium sporogenes; FldA: indole-3-propionyl-CoA:indole-3-lactate CoA transferase, e.g., from Clostridium sporogenes; FldBC: indole-3-lactate dehydratase, e.g., from Clostridium sporogenes; FldD: indole-3-acrylyl-CoA reductase, e.g., from Clostridium sporogenes; AcuI: acrylyl-CoA reductase, e.g., from Rhodobacter sphaeroides. 1pdC: Indole-3-pyruvate decarboxylase, e.g., from Enterobacter cloacae; 1ad1: Indole-3-acetaldehyde dehydrogenase, e.g., from Ustilago maydis; Tdc: Tryptophan decarboxylase, e.g., from Catharanthus roseus or from Clostridium sporogenes.

[0055] Tryptophan dehydrogenase (EC 1.4.1.19) is an enzyme that catalyzes the reversible chemical reaction converting L-tryptophan, NAD(P) and water to (indol-3-yl)pyruvate (IPyA), NH₃, NAD(P)H and H⁺. Indole-3-lactate dehydrogenase ((EC 1.1.1.110, e.g., Clostridium sporogenes or Lactobacillus casei) converts (indol-3yl)pyruvate (IpyA) and NADH and H+ to indole-3-lactate (ILA) and NAD+. Indole-3-propionyl-CoA:indole-3-lactate CoA transferase (FldA) converts indole-3-lactate (ILA) and indol-3-propionyl-CoA to indole-3-propionic acid (IPA) and indole-3-lactate-CoA. Indole-3-acrylyl-CoA reductase (F1dD) and acrylyl-CoA reductase (Acul) convert indole-3-acrylyl-CoA to indole-3-propionyl-CoA. Indole-3-lactate dehydratase (FldBC) converts indole-3-lactate-CoA to indole-3-acrylyl-CoA. Indole-3-pyruvate decarboxylase (1pdC:) converts Indole-3-pyruvic acid (IPyA) into Indole-3-acetaldehyde (IAAld) lad1: Indole-3-acetaldehyde dehydrogenase coverts Indole-3-acetaldehyde (IAAld) into Indole-3-acetic acid (IAA) Tdc: Tryptophan decarboxylase converts tryptophan (Trp) into tryptamine (TrA). In some embodiments, the genetically engineered bacteria further comprise one or more circuits for the production of tryptophan, e.g., as shown in FIG. 36 (A-D) and FIG. 40 and as described elsewhere herein. In some embodiments, AroG and/or TrpE are replaced with feedback resistant versions to improve tryptophan production in the genetically engineered bacteria. In some embodiments, trpR and/or the tnaA gene (encoding a tryptophanase converting tryptophan into indole) are deleted to further increase levels of tryptophan produced.

[0056] FIG. 45 depicts a bar graph showing tryptophan and indole acetic acid production for strains SYN2126, SYN2339 and SYN2342. SYN2126: comprises ΔtrpR and ΔtnaA (ΔtrpRΔtnaA). SYN2339 comprises circuitry for the production of tryptophan (ΔtrpRΔtnaA, tetR-Ptet-trpEfbrDCBA (pSC101), tetR-Ptet-aroGfbr (p15A)). SYN2342 comprises the same tryptophan production circuitry as the parental strain SYN2339, and additionally comprises ipdC-iad1 incorporated at the end of the second construct (AtrpRΔtnaA, tetR-Ptet-trpEfbrDCBA (pSC101), tetR-Ptet-aroGfbr-trpDH-ipdC-iad1 (p15A)). SYN2126 produced no tryptophan, SYN2339 produces increasing tryptophan over the time points measured, and SYN2342 converts all trypophan it produces into IAA.

[0057] FIG. 46 depicts a bar graph showing tryptophan and tryptamine production for strains SYN2339, SYN2340, and SYN2794. SYN2339 is used as a control which can produce tryptophan but cannot convert it to tryptamine and comprises ΔtrpRΔtnaA, tetR-Pₜₑₜ-trpE^{fbr}DCBA (pSC101), tetR-PₜₑₜaroG^{fhr} (p15A). SYN2340 comprises ΔtrpRΔtnaA, tetR-Pₜₑₜ-trpE^{fbr}DCBA (pSC101), tetR-PₜₑₜaroG^{fbr}-tdc_{Cr} (p15A). SYN2794 comprises ΔtrpRΔtnaA, tetR-Pₜₑₜ-trpE^{fbr}DCBA (pSC101), tetR-PₜₑₜaroG^{fbr}-tdc_{Cs} (p15A). Results indicate that Tdc_{Cs} from Clostridium sporogenes is more efficient the Tdc_{Cr} from Catharanthus roseus in tryptamine production and converts all the tryptophan produced into tryptamine.

[0058] FIG. 47 depicts a schematic of an E. coli that is genetically engineered to express a butyrate cassette.

[0059] FIG. 48 depicts a schematic of an E. coli that is genetically engineered to express a a propionate biosynthestic cassette.

[0060] FIG. 49 depicts a schematic of an E. coli that is genetically engineered to express a GLP-1 and a secretion system as known in the art or described herein.

[0061] FIG. 50 depicts a schematic showing an exemplary Kynurenine Synthesis Circuit. Kynurenine and or Tryptophan is imported into the cell through expression of the aroP, tnaB or mtr transporter. Kynurenine biosynthetic cassette is expressed to produce Kynurenine. Both the transporter and Kynurenine biosynthetic cassette genes are optionally expressed from an inducible promoter, e.g., a FNR-inducible promoter. The bacteria may also include an auxotrophy, e.g., deletion of thyA (Δ thyA).

[0062] FIG. 51 depicts a schematic showing an exemplary Kynurenine Synthesis Circuit. Kynurenine and or Tryptophan is imported into the cell through expression of the aroP, tnaB or mtr transporter. Tryptophan is synthesized and then Kynurenine is synthesized from the synthesized tryptophan or from tryptophan imported into the cell. Both the transporter and kynureninase biosynthetic genes are optionally expressed from an inducible promoter, e.g., a FNR-inducible promoter. The bacteria may also include an auxotrophy, e.g., deletion of thyA (Δ thyA).

[0063] FIG. 52 depicts a schematic of an E. coli that is genetically engineered to express a butyrate and a propionate biosynthestic cassette.

[0064] FIG. 53 depicts a schematic of an E. coli that is genetically engineered to produce kynurenine, butyrate, and tryptophan (which can be converted to kynurenine or exported), under the control of a FNR-responsive promoter and further comprising a secretion system as known in the art or described herein. Export mechanism for kynurenine and/or tryptophan is also expressed or provided.

[0065] FIG. 54 depicts a schematic of an E. coli that is genetically engineered to produce kynurenine, butyrate, and tryptophan (which can be converted to tryptamine and/or indole acetic acid or exported), under the control of a FNR-responsive promoter and further comprising a secretion system as known in the art or described herein. A tryptophan transporter for import of tryptophan also expressed. Export mechanism for kynurenine is also expressed or provided.

[0066] FIG. 55 depicts a schematic of an E. coli that is genetically engineered to produce butyrate, tryptophan metabolites, and tryptophan (which can be converted to bioactive tryptophan metabolites or exported), under the control of a FNR-responsive promoter and further comprising a secretion system as known in the art or described herein. Export mechanism for tryptophan and/or tryptophan metabolites is also expressed or provided.

[0067] FIG. 56 depicts a schematic of an E. coli that is genetically engineered to produce butyrate, and propionate, kynurenine and/or other tryptophan metabolites, and GLP-1, under the control of a FNR-responsive promoter and further comprising a secretion system, e.g., for GLP-1 secretion as known in the art or described herein. Export mechanism for kynurenine/or tryptophan metabolites is also expressed or provided.

[0068] FIG. 57 depicts a map of exemplary integration sites within the E. coli 1917 Nissle chromosome. These sites indicate regions where circuit components may be inserted into the chromosome without interfering with essential gene expression. Backslashes (/) are used to show that the insertion will occur between divergently or convergently expressed genes. Insertions within biosynthetic genes, such as thyA, can be useful for creating nutrient auxotrophies. In some embodiments, an individual circuit component is inserted into more than one of the indicated sites. The malE/K site is circled. In some embodiments of the disclosure, FNR-ArgAfbr is inserted at the malEK locus.

[0069] FIG. 58 depicts three bacterial strains which constitutively express red fluorescent protein (RFP). In strains 1-3, the rfp gene has been inserted into different sites within the bacterial chromosome, and results in varying degrees of brightness under fluorescent light. Unmodified E. coli Nissle (strain 4) is non-fluorescent.

[0070] FIG. 59 depicts an exemplary schematic of the E. coli 1917 Nissle chromosome comprising multiple mechanisms of action (MoAs).

[0071] FIG. 60 depicts an exemplary schematic of the E. coli 1917 Nissle chromosome comprising multiple MoAs. In some embodiments, an Glp-1 expression circuit, a butyrate production circuit, a propionate production circuit, and a tryptophan and/or indole metabolite biosynthetic cassette are inserted at four or more different chromosomal insertion sites

[0072] FIG. 61 depicts a schematic of a secretion system based on the flagellar type III secretion in which an incomplete flagellum is used to secrete a therapeutic peptide of interest (star) by recombinantly fusing the peptide to an N-terminal flagellar secretion signal of a native flagellar component so that the intracellularly expressed chimeric peptide can be mobilized across the inner and outer membranes into the surrounding host environment.

[0073] FIG. 62 depicts a schematic of a type V secretion system for the extracellular production of recombinant proteins in which a therapeutic peptide (star) can be fused to an N-terminal secretion signal, a linker and the beta-domain of an autotransporter. In this system, the N-terminal signal sequence directs the protein to the SecA-YEG machinery which moves the protein across the inner membrane into the periplasm, followed by subsequent cleavage of the signal sequence. The beta-domain is recruited to the Bam complex where the beta-domain is folded and inserted into the outer membrane as a beta-barrel structure. The therapeutic peptide is then thread through the hollow pore of the beta-barrel structure ahead of the linker sequence. The therapeutic peptide is freed from the linker system by an autocatalytic cleavage or by targeting of a membrane-associated peptidase (scissors) to a complementary protease cut site in the linker.

[0074] FIG. 63 depicts a schematic of a type I secretion system, which translocates a passenger peptide directly from the cytoplasm to the extracellular space using HlyB (an ATP-binding cassette transporter); HlyD (a membrane fusion protein); and TolC (an outer membrane protein) which form a channel through both the inner and outer membranes. The secretion signal-containing C-terminal portion of HlyA is fused to the C-terminal portion of a therapeutic peptide (star) to mediate secretion of this peptide.

[0075] FIG. 64 depicts a schematic of the outer and inner membranes of a gram-negative bacterium, and several deletion targets for generating a leaky or destabilized outer membrane, thereby facilitating the translocation of a therapeutic polypeptides to the extracellular space, e.g., therapeutic polypeptides of eukaryotic origin containing disulphide bonds. Deactivating mutations of one or more genes encoding a protein that tethers the outer membrane to the peptidoglycan skeleton, e.g., lpp, ompC, ompA, ompF, tolA, tolB, pal, and/or one or more genes encoding a periplasmic protease, e.g., degS, degP, nlpl, generates a leaky phenotype. Combinations of mutations may synergistically enhance the leaky phenotype.

[0076] FIG. 65 depicts a modified type 3 secretion system (T3SS) to allow the bacteria to inject secreted therapeutic proteins into the gut lumen. An inducible promoter (small arrow, top), e.g. a FNR-inducible promoter, drives expression of the T3 secretion system gene cassette (3 large arrows, top) that produces the apparatus that secretes tagged peptides out of the cell. An inducible promoter (small arrow, bottom), e.g. a FNR-inducible promoter, drives expression of a regulatory factor, e.g. T7 polymerase, that then activates the expression of the tagged therapeutic peptide (hexagons).

[0077] FIG. 66A, FIG. 66B, and FIG. 66C depict schematics of the gene organization of exemplary circuits of the disclosure for the expression of therapeutic polypeptides, e.g., metabolic and/or satiety effector and/or immune modulator polypeptides described herein, which are secreted using components of the flagellar type III secretion system. A therapeutic polypeptide of interest, is assembled behind a fliC-5′UTR, and is driven by the native fliC and/or fliD promoter (FIG. 66A and FIG. 66B) or a tet-inducible promoter (FIG. 66C). In alternate embodiments, an inducible promoter such as oxygen level-dependent promoters (e.g., FNR-inducible promoter), and promoters induced by a metabolite that may or may not be naturally present (e.g., can be exogenously added) in the gut, e.g., arabinose can be used. In certain embodiments the one or more cassettes are under the control of constitutive promoters. The therapeutic polypeptide of interest is either expressed from a plasmid (e.g., a medium copy plasmid) or integrated into fliC loci (thereby deleting all or a portion of fliC and/or fliD). Optionally, an N terminal part of FliC is included in the construct, as shown in FIG. 66B and FIG. 66D.

[0078] FIG. 67A and FIG. 67B depict schematics of the gene organization of exemplary circuits of the disclosure for the expression of therapeutic polypeptides, e.g., metabolic and/or satiety effector and/or immune modulator polypeptides described herein, which are secreted via a diffusible outer membrane (DOM) system. The therapeutic polypeptide of interest is fused to a prototypical N-terminal Sec-dependent secretion signal or Tat-dependent secretion signal, which is is cleaved upon secretion into the periplasmic space. Exemplary secretion tags include sec-dependent PhoA, OmpF, OmpA, cvaC, and Tat-dependent tags (TorA, FdnG, DmsA). In certain embodiments, the genetically engineered bacteria comprise deletions in one or more of lpp, pal, tolA, and/or nlpl. Optionally, periplasmic proteases are also deleted, including, but not limited to, degP and ompT, e.g., to increase stability of the polypeptide in the periplasm. A FRT-KanR-FRT cassette is used for downstream integration. Expression is driven by a tet promoter (FIG. 67A) or an inducible promoter, such as oxygen level-dependent promoters (e.g., FNR-inducible promoter, FIG. 67B), and promoters induced by a metabolite that may or may not be naturally present (e.g., can be exogenously added) in the gut, e.g., arabinose. In certain embodiments the one or more cassettes are under the control of constitutive promoters.

[0079] FIG. 68 depicts another non-limiting embodiment of the disclosure, wherein the expression of a heterologous gene is activated by an exogenous environmental signal. In the absence of arabinose, the AraC transcription factor adopts a conformation that represses transcription. In the presence of arabinose, the AraC transcription factor undergoes a conformational change that allows it to bind to and activate the ParaBAD promoter (P_{araBAD}), which induces expression of the Tet repressor (TetR) and an anti-toxin. The anti-toxin builds up in the recombinant bacterial cell, while TetR prevents expression of a toxin (which is under the control of a promoter having a TetR binding site). However, when arabinose is not present, both the anti-toxin and TetR are not expressed. Since TetR is not present to repress expression of the toxin, the toxin is expressed and kills the cell. FIG. 68A also depicts another non-limiting embodiment of the disclosure, wherein the expression of an essential gene not found in the recombinant bacteria is activated by an exogenous environmental signal. In the absence of arabinose, the AraC transcription factor adopts a conformation that represses transcription of the essential gene under the control of the araBAD promoter and the bacterial cell cannot survive. In the presence of arabinose, the AraC transcription factor undergoes a conformational change that allows it to bind to and activate the araBAD promoter, which induces expression of the essential gene and maintains viability of the bacterial cell. FIG. 68B depicts a non-limiting embodiment of the disclosure, where an anti-toxin is expressed from a constitutive promoter, and expression of a heterologous gene is activated by an exogenous environmental signal. In the absence of arabinose, the AraC transcription factor adopts a conformation that represses transcription. In the presence of arabinose, the AraC transcription factor undergoes a conformational change that allows it to bind to and activate the araBAD promoter, which induces expression of TetR, thus preventing expression of a toxin. However, when arabinose is not present, TetR is not expressed, and the toxin is expressed, eventually overcoming the anti-toxin and killing the cell. The constitutive promoter regulating expression of the anti-toxin should be a weaker promoter than the promoter driving expression of the toxin. The araC gene is under the control of a constitutive promoter in this circuit. FIG. 68C depicts another non-limiting embodiment of the disclosure, wherein the expression of a heterologous gene is activated by an exogenous environmental signal. In the absence of arabinose, the AraC transcription factor adopts a conformation that represses transcription. In the presence of arabinose, the AraC transcription factor undergoes a conformational change that allows it to bind to and activate the araBAD promoter, which induces expression of the Tet repressor (TetR) and an anti-toxin. The anti-toxin builds up in the recombinant bacterial cell, while TetR prevents expression of a toxin (which is under the control of a promoter having a TetR binding site). However, when arabinose is not present, both the anti-toxin and TetR are not expressed. Since TetR is not present to repress expression of the toxin, the toxin is expressed and kills the cell. The araC gene is either under the control of a constitutive promoter or an inducible promoter (e.g., AraC promoter) in this circuit.

[0080] FIG. 69 depicts one non-limiting embodiment of the disclosure, where an exogenous environmental condition or one or more environmental signals activates expression of a heterologous gene and at least one recombinase from an inducible promoter or inducible promoters. The recombinase then flips a toxin gene into an activated conformation, and the natural kinetics of the recombinase create a time delay in expression of the toxin, allowing the heterologous gene to be fully expressed. Once the toxin is expressed, it kills the cell.

[0081] FIG. 70 depicts another non-limiting embodiment of the disclosure, where an exogenous environmental condition or one or more environmental signals activates expression of a heterologous gene, an anti-toxin, and at least one recombinase from an inducible promoter or inducible promoters. The recombinase then flips a toxin gene into an activated conformation, but the presence of the accumulated anti-toxin suppresses the activity of the toxin. Once the exogenous environmental condition or cue(s) is no longer present, expression of the anti-toxin is turned off. The toxin is constitutively expressed, continues to accumulate, and kills the bacterial cell.

[0082] FIG. 71 depicts another non-limiting embodiment of the disclosure, where an exogenous environmental condition or one or more environmental signals activates expression of a heterologous gene and at least one recombinase from an inducible promoter or inducible promoters. The recombinase then flips at least one excision enzyme into an activated conformation. The at least one excision enzyme then excises one or more essential genes, leading to senescence, and eventual cell death. The natural kinetics of the recombinase and excision genes cause a time delay, the kinetics of which can be altered and optimized depending on the number and choice of essential genes to be excised, allowing cell death to occur within a matter of hours or days. The presence of multiple nested recombinases can be used to further control the timing of cell death.

[0083] FIG. 72 depicts one non-limiting embodiment of the disclosure, where an exogenous environmental condition or one or more environmental signals activates expression of a heterologous gene and a first recombinase from an inducible promoter or inducible promoters. The recombinase then flips a second recombinase from an inverted orientation to an active conformation. The activated second recombinase flips the toxin gene into an activated conformation, and the natural kinetics of the recombinase create a time delay in expression of the toxin, allowing the heterologous gene to be fully expressed. Once the toxin is expressed, it kills the cell.

[0084] FIG. 73 depicts the use of GeneGuards as an engineered safety component. All engineered DNA is present on a plasmid which can be conditionally destroyed. See, e.g., Wright et al., “GeneGuard: A Modular Plasmid System Designed for Biosafety,” ACS Synthetic Biology (2015) 4: 307-316.

[0085] FIG. 61A, FIG. 74B, FIG. 74C, and FIG. 74D depict schematics of non-limiting examples of the gene organization of plasmids, which function as a component of a biosafety system (FIG. 74A and FIG. 74B), which also contains a chromosomal component (shown in FIG. 74C and FIG. 74D). The Biosafety Plasmid System Vector comprises Kid Toxin and R6K minimal ori, dapA (FIG. 74A) and thyA (FIG. 74B) and promoter elements driving expression of these components. In some embodiments, bla is knocked out and replaced with one or more constructs described herein, and one or more metabolic and/or satiety effector(s) and/or immune modulator are expressed from an inducible or constitutive promoter. FIG. 74C and FIG. 74D depict schematics of the gene organization of the chromosomal component of a biosafety system. FIG. 74C depicts a construct comprising low copy Rep (Pi) and Kis antitoxin, in which transcription of Pi (Rep), which is required for the replication of the plasmid component of the system, is driven by a low copy RBS containing promoter. FIG. 74D depicts a construct comprising a medium-copy Rep (Pi) and Kis antitoxin, in which transcription of Pi (Rep), which is required for the replication of the plasmid component of the system, is driven by a medium copy RBS containing promoter. If the plasmid containing the functional DapA is used (as shown in FIG. 74A), then the chromosomal constructs shown in FIG. 74C and FIG. 74D are knocked into the DapA locus. If the plasmid containing the functional ThyA is used (as shown in FIG. 74B), then the chromosomal constructs shown in FIG. 74C and FIG. 74D are knocked into the ThyA locus. In this system, the bacteria comprising the chromosomal construct and a knocked out dapA or thyA gene can grow in the absence of dap or thymidine only in the presence of the plasmid.

[0086] FIG. 75 depicts β-galactosidase levels in samples comprising bacteria harboring a low-copy plasmid expressing lacZ from an FNR-responsive promoter selected from the exemplary FNR promoters shown in Table 2 (Pfnr1-5). Different FNR-responsive promoters were used to create a library of anaerobic-inducible reporters with a variety of expression levels and dynamic ranges. These promoters included strong ribosome binding sites. Bacterial cultures were grown in either aerobic (+O₂) or anaerobic conditions (−O₂). Samples were removed at 4 hrs and the promoter activity based on β-galactosidase levels was analyzed by performing standard β-galactosidase colorimetric assays.

[0087] FIG. 76A depicts a schematic representation of the lacZ gene under the control of an exemplary FNR promoter (P_{fnrs}). LacZ encodes the β-galactosidase enzyme and is a common reporter gene in bacteria. FIG. 76B depicts FNR promoter activity as a function of (3-galactosidase activity in SYN340. SYN340, an engineered bacterial strain harboring a low-copy fnrS-lacZ fusion gene, was grown in the presence or absence of oxygen. Values for standard β-galactosidase colorimetric assays are expressed in Miller units (Miller, 1972). These data suggest that the fnrS promoter begins to drive high-level gene expression within 1 hr under anaerobic conditions. FIG. 76C depicts the growth of bacterial cell cultures expressing lacZ over time, both in the presence and absence of oxygen.

[0088] FIG. 77A and FIG. 77B depict schematics of ATC (FIG. 77A) or nitric oxide-inducible (FIG. 77B) reporter constructs. These constructs, when induced by their cognate inducer, lead to expression of GFP. Nissle cells harboring plasmids with either the control, ATC-inducible Pₜₑₜ-GFP reporter construct or the nitric oxide inducible P_{nsrR}-GFP reporter construct induced across a range of concentrations. Promoter activity is expressed as relative florescence units. FIG. 77C depicts a schematic of the constructs. FIG. 77D depicts a dot blot of bacteria harboring a plasmid expressing NsrR under control of a constitutive promoter and the reporter gene gfp (green fluorescent protein) under control of an NsrR-inducible promoter. DSS-treated mice serve as exemplary models for HE. As in HE subjects, the guts of mice are damaged by supplementing drinking water with 2-3% dextran sodium sulfate (DSS). Chemiluminescent is shown for NsrR-regulated promoters induced in DSS-treated mice.

[0089] FIG. 78A depicts a “Oxygen bypass switch” useful for aerobic pre-induction of a strain comprising one or proteins of interest (POI), e.g., one or more metabolic and/or satiety effector(s) (POI1) and /or immune modulator and/or one or more transporter(s)/importer(s) and/or exporter(s) (PGI2) under the control of a low oxygen FNR promoter in vitro in a culture vessel (e.g., flask, fermenter or other vessel, e.g., used during with cell growth, cell expansion, fermentation, recovery, purification, formulation, and/or manufacture). In some embodiments, it is desirable to pre-load a strain with active payload(s) prior to administration. This can be done by pre-inducing the expression of these enzymes as the strains are propagated, (e.g., in flasks, fermenters or other appropriate vesicles) and are prepared for in vivo administration. In some embodiments, strains are induced under anaerobic and/or low oxygen conditions, e.g. to induce FNR promoter activity and drive expression of one or more proteins of interest. In some embodiments, it is desirable to prepare, pre-load and pre-induce the strains under aerobic or microaerobic conditions with one or more proteins of interest. This allows more efficient growth and, in some cases, reduces the build-up of toxic metabolites.

[0090] FNRS24Y is a mutated form of FNR which is more resistant to inactivation by oxygen, and therefore can activate FNR promoters under aerobic conditions (see e.g., Jervis A J, The O2 sensitivity of the transcription factor FNR is controlled by Ser24 modulating the kinetics of [4Fe-4S] to [2Fe-2S] conversion, Proc Natl Acad Sci U S A. 2009 Mar. 24; 106(12):4659-64, the contents of which is herein incorporated by reference in its entirety). The O2 sensitivity of the transcription factor FNR is controlled by Ser24 modulating the kinetics of [4Fe-4S] to [2Fe-2S] conversion, Proc Natl Acad Sci U S A. 2009 Mar. 24; 106(12):4659-64, the contents of which is herein incorporated by reference in its entirety). In this oxygen bypass system, FNRS24Y is induced by addition of arabinose and then drives the expression of one or more POIs by binding and activating the FNR promoter under aerobic conditions. Thus, strains can be grown, produced or manufactured efficiently under aerobic conditions, while being effectively pre-induced and pre-loaded, as the system takes advantage of the strong FNR promoter resulting in of high levels of expression of one or more POIs. This system does not interfere with or compromise in vivo activation, since the mutated FNRS24Y is no longer expressed in the absence of arabinose, and wild type FNR then binds to the FNR promoter and drives expression of the POIs in vivo.

[0091] In some embodiments, a Lad promoter and IPTG induction are used in this system (in lieu of Para and arabinose induction). In some embodiments, a rhamnose inducible promoter is used in this system. In some embodiments, a temperature sensitive promoter is used to drive expression of FNRS24Y.

[0092] FIG. 78B depicts a strategy to allow the expression of one or more POI(s) under aerobic conditions through the arabinose inducible expression of FNRS24Y. By using a ribosome binding site optimization strategy, the levels of FnrS24Y expression can be fine-tuned, e.g., under optimal inducing conditions (adequate amounts of arabinose for full induction). Fine-tuning is accomplished by selection of an appropriate RBS with the appropriate translation initiation rate. Bioinformatics tools for optimization of RBS are known in the art.

[0093] FIG. 78C depicts a strategy to fine-tune the expression of a Para-POI construct by using a ribosome binding site optimization strategy. Bioinformatics tools for optimization of RBS are known in the art. In one strategy, arabinose controlled POI genes can be integrated into the chromosome to provide for efficient aerobic growth and pre-induction of the strain (e.g., in flasks, fermenters or other appropriate vesicles), while integrated versions of PfnrS-POI constructs are maintained to allow for strong in vivo induction.

[0094] FIG. 79 depicts a construct comprising FNRS24Y driven by the arabinose inducible promoter and araC in reverse direction.

[0095] FIG. 80 depicts the gene organization of an exemplary construct, comprising a cloned protein of interest (POI) gene under the control of a Tet promoter sequence and a Tet repressor gene.

[0096] FIG. 81 depicts the gene organization of an exemplary construct comprising Lad in reverse orientation, and a IPTG inducible promoter driving the expression of a protein of interest (POI, e.g., one or more metabolic effector(s) described herein). In some embodiments, this construct is useful for pre-induction and pre-loading of a therapeutic strain prior to in vivo administration under aerobic conditions and in the presence of inducer, e.g., IPTG. In some embodiments, this construct is used alone. In some embodiments, the construct is used in combination with other constitutive or inducible POI constructs, e.g., low oxygen, arabinose or IPTG inducible constructs. In some embodiments, the construct is used in combination with a low-oxygen inducible construct which is active in an in vivo setting.

[0097] FIG. 82A, FIG. 82B, and FIG. 82C depict schematics of non-limiting examples of constructs expressing a protein of interest (POI). FIG. 82A depicts a schematic of a non-limiting example of the organization of a construct for POI expression under the control a lambda CI inducible promoter. The construct also provides the coding sequence of a mutant of CI, CI857, which is a temperature sensitive mutant of CI. The temperature sensitive CI repressor mutant, CI857, binds tightly at 30 degrees C. but is unable to bind (repress) at temperatures of 37 C and above. In some embodiments, the construct comprises SEQ ID NO: 101. In some embodiments, this construct is used alone. In some embodiments, the temperature sensitive construct is used in combination with other constitutive or inducible POI constructs, e.g., low oxygen, arabinose, rhamnose, or IPTG inducible constructs. In some embodiments, the construct allows pre-induction and pre-loading of one or more POIs prior to in vivo administration. In some embodiments, the construct provides in vivo activity. In some embodiments, the construct is located on a plasmid, e.g., a low copy or a high copy plasmid. In some embodiments, the construct is located on a plasmid component of a biosafety system. In some embodiments, the construct is integrated into the bacterial chromosome at one or more locations. In some embodiments, the construct is used in combination with other POI constructs, which can either be provided on a plasmid or is integrated into the bacterial chromosome at one or more locations. In some embodiments, a temperature sensitive system can be used to set up a conditional auxotrophy. In a a strain comprising deltaThyA or deltaDapA, a dapA or thyA gene can be introduced into the strain under the control of a thermoregulated promoter system. The strain can grow in the absence of Thy and Dap only at the permissive temperature, e.g., 37 C (and not lower).

[0098] FIG. 82B depicts a schematic of a non-limiting example of the organization of a construct for POI expression under the control of a rhamnose inducible promoter. For the application of the rhamnose expression system it is not necessary to express the regulatory proteins in larger quantities, because the amounts expressed from the chromosome are sufficient to activate transcription even on multi-copy plasmids. Therefore, only the rhaP BAD promoter is cloned upstream of the gene that is to be expressed. In some embodiments, this construct is used alone. In some embodiments, the rhamnose inducible construct is used in combination with other constitutive or inducible POI constructs, e.g., low oxygen, arabinose, temperature sensitive, or IPTG inducible constructs. In some embodiments, the construct allows pre-induction and pre-loading of one or more POIs prior to in vivo administration. In a non-limiting example, the construct is useful for pre-induction and is combined with low-oxygen inducible constructs. In some embodiments, the construct is located on a plasmid, e.g., a low copy or a high copy plasmid. In some embodiments, the construct is located on a plasmid component of a bio safety system. In some embodiments, the construct is integrated into the bacterial chromosome at one or more locations.

[0099] FIG. 82C depicts a schematic of a non-limiting example of the organization of a construct for POI expression under the control of an arabinose inducible promoter. The arabinose inducible POI construct comprises AraC (in reverse orientation), a region comprising an Arabinose inducible promoter, and the POI gene. In some embodiments, this construct is used alone. In some embodiments, the rhamnose inducible construct is used in combination with other constitutive or inducible POI constructs, e.g., low oxygen, arabinose, temperature sensitive, or IPTG inducible constructs. In some embodiments, the construct allows pre-induction and pre-loading of one or more POI(s) prior to in vivo administration. In a non-limiting example, the construct is useful for pre-induction and is combined with low-oxygen inducible constructs. In some embodiments, the construct is located on a plasmid, e.g., a low copy or a high copy plasmid. In some embodiments, the construct is located on a plasmid component of a bio safety system. In some embodiments, the construct is integrated into the bacterial chromosome at one or more locations.

[0100] FIG. 83A depicts a schematic of the gene organization of a PssB promoter. The ssB gene product protects ssDNA from degradation; SSB interacts directly with numerous enzymes of DNA metabolism and is believed to have a central role in organizing the nucleoprotein complexes and processes involved in DNA replication (and replication restart), recombination and repair. The PssB promoter was cloned in front of a LacZ reporter and beta-galactosidase activity was measured. FIG. 83B depicts a bar graph showing the reporter gene activity for the PssB promoter under aerobic and anaerobic conditions. Briefly, cells were grown aerobically overnight, then diluted 1:100 and split into two different tubes. One tube was placed in the anaerobic chamber, and the other was kept in aerobic conditions for the length of the experiment. At specific times, the cells were analyzed for promoter induction. The Pssb promoter is active under aerobic conditions, and shuts off under anaerobic conditions. This promoter can be used to express a gene of interest under aerobic conditions. This promoter can also be used to tightly control the expression of a gene product such that it is only expressed under anaerobic and/or low oxygen conditions. In this case, the oxygen induced PssB promoter induces the expression of a repressor, which represses the expression of a gene of interest. Thus, the gene of interest is only expressed in the absence of the repressor, i.e., under anaerobic and/or low oxygen conditions. This strategy has the advantage of an additional level of control for improved fine-tuning and tighter control. In one non-limiting example, this strategy can be used to control expression of thyA and/or dapA, e.g., to make a conditional auxotroph. The chromosomal copy of dapA or ThyA is knocked out. Under anaerobic and/or low oxygen conditions, dapA or thyA—as the case may be—are expressed, and the strain can grow in the absence of dap or thymidine. Under aerobic conditions, dapA or thyA expression is shut off, and the strain cannot grow in the absence of dap or thymidine. Such a strategy can, for example be employed to allow survival of bacteria under anaerobic and/or low oxygen conditions, e.g., the gut, but prevent survival under aerobic conditions (biosafety switch).

[0101] FIG. 84 depicts a graph of Nissle residence in vivo. Streptomycin-resistant Nissle was administered to mice via oral gavage without antibiotic pre-treatment. Fecal pellets from 6 total mice were monitored post-administration to determine the amount of administered Nissle still residing within the mouse gastrointestinal tract. The bars represent the number of bacteria administered to the mice. The line represents the number of Nissle recovered from the fecal samples each day for 10 consecutive days.

[0102] FIG. 85 depicts a bar graph of residence over time for streptomycin resistant Nissle in various compartments of the intestinal tract at 1, 4, 8, 12, 24, and 30 hours post gavage. Mice were treated with approximately 109 CFU, and at each timepoint, animals (n=4) were euthanized, and intestine, cecum, and colon were removed. The small intestine was cut into three sections, and the large intestine and colon each into two sections. Intestinal effluents gathered and CFUs in each compartment were determined by serial dilution plating. FIG. 85 depicts a bar graph of residence over time for streptomycin resistant Nissle.

[0103] FIG. 86 depicts a schematic diagram of a wild-type clbA construct (upper panel) and a schematic diagram of a clbA knockout construct (lower panel).

[0104] FIG. 87 depicts a schematic of a design-build-test cycle. Steps are as follows: 1: Define the disease pathway; 2. Identify target metabolites; 3. Design genetic circuits; 4. Build synthetic biotic; 5. Activate circuit in vivo; 6. Characterize circuit activation kinetics; 7. Optimize in vitro productivity to disease threshold; 8. Test optimize circuit in animla disease model; 9. Assimilate into the microbiome; 10. Develop understanding of in vivo PK and dosing regimen.

[0105] FIG. 88A, B, C, D, and E depict a schematic of non-limiting manufacturing processes for upstream and downstream production of the genetically engineered bacteria of the present disclosure. FIG. 88A depicts the parameters for starter culture 1 (SC1): loop full—glycerol stock, duration overnight, temperature 37° C., shaking at 250 rpm. FIG. 88B depicts the parameters for starter culture 2 (SC2): 1/100 dilution from SC1, duration 1.5 hours, temperature 37° C., shaking at 250 rpm. FIG. 88C depicts the parameters for the production bioreactor: inoculum—SC2, temperature 37° C., pH set point 7.00, pH dead band 0.05, dissolved oxygen set point 50%, dissolved oxygen cascade agitation/gas FLO, agitation limits 300-1200 rpm, gas FLO limits 0.5-20 standard liters per minute, duration 24 hours. FIG. 88D depicts the parameters for harvest: centrifugation at speed 4000 rpm and duration 30 minutes, wash 1×10% glycerol/PBS, centrifugation, re-suspension 10% glycerol/PBS. FIG. 88E depicts the parameters for vial fill/storage: 1-2 mL aliquots, −80° C.

### DESCRIPTION OF EMBODIMENTS

[0106] The invention includes genetically engineered bacteria, pharmaceutical compositions thereof, and methods of modulating and treating metabolic diseases. In some embodiments, the genetically engineered bacteria comprise gene sequence encoding one or more non-native metabolic and/or satiety effector and/or immune modulator molecule(s), or a gene cassette(s) encoding one or more non-native biosynthetic pathway(s) for producing one or more non-native metabolic and/or satiety effector and/or immune modulator molecule(s). In some embodiments, the genetically engineered bacteria comprise gene sequence encoding one or more non-native metabolic and/or satiety effector and/or immune modulator molecule(s), or a gene cassette(s) encoding one or more non-native biosynthetic pathway(s) for producing one or more non-native metabolic and/or satiety effector and/or immune modulator molecule(s) and further comprise gene sequence encoding one or more immune modulator molecules, such as any of the immune modulators described herein. In some embodiments, the gene sequence or gene cassette is further operably linked to an inducible promoter, for example, a regulatory region that is controlled by a transcription factor that is capable of sensing low-oxygen conditions, inflammatory conditions, or other tissue-specific or environment-specific conditions. In certain embodiments, the genetically engineered bacteria are capable of producing metabolic and/or satiety effector molecule and/or anti-inflammatory molecules in low-oxygen environments, e.g., the gut. Thus, the genetically engineered bacteria and pharmaceutical compositions comprising those bacteria may be used in order to treat and/or prevent conditions associated with metabolic diseases, including obesity and type 2 diabetes.

[0107] In order that the disclosure may be more readily understood, certain terms are first defined. These definitions should be read in light of the remainder of the disclosure and as understood by a person of ordinary skill in the art. Unless defined otherwise, all technical and scientific terms used herein have the same meaning as commonly understood by a person of ordinary skill in the art. Additional definitions are set forth throughout the detailed description.

[0108] As used herein, “metabolic diseases” include, but are not limited to, type 1 diabetes; type 2 diabetes; metabolic syndrome; Bardet-Biedel syndrome; Prader-Willi syndrome; non-alcoholic fatty liver disease; tuberous sclerosis; Albright hereditary osteodystrophy; brain-derived neurotrophic factor (BDNF) deficiency; Single-minded 1 (SIM1) deficiency; leptin deficiency; leptin receptor deficiency; pro-opiomelanocortin (POMC) defects; proprotein convertase subtilisin/kexin type 1 (PCSK1) deficiency; Src homology 2B1 (SH2B1) deficiency; pro-hormone convertase 1/3 deficiency; melanocortin-4-receptor (MC4R) deficiency; Wilms tumor, aniridia, genitourinary anomalies, and mental retardation (WAGR) syndrome; pseudohypoparathyroidism type 1A; Fragile X syndrome; Borjeson-Forsmann-Lehmann syndrome; Alstrom syndrome; Cohen syndrome; and ulnar-mammary syndrome.

[0109] Symptoms associated with the aforementioned diseases and conditions include, but are not limited to, one or more of weight gain, obesity, fatigue, hyperlipidemia, hyperphagia, hyperdipsia, polyphagia, polydipsia, polyuria, pain of the extremities, numbness of the extremities, blurry vision, nystagmus, hearing loss, cardiomyopathy, insulin resistance, light sensitivity, pulmonary disease, liver disease, liver cirrhosis, liver failure, kidney disease, kidney failure, seizures, hypogonadism, and infertility.

[0110] Metabolic diseases are associated with a variety of physiological changes, including but not limited to elevated glucose levels, elevated triglyceride levels, elevated cholesterol levels, insulin resistance, high blood pressure, hypogonadism, subfertility, infertility, abdominal obesity, pro-thrombotic conditions, and pro-inflammatory conditions. A metabolic effector is a molecule that is capable of minimizing any one or more of said physiological changes. For example, a metabolic effector molecule may enhance the body's sensitivity to insulin, thereby ameliorating insulin resistance. Insulin resistance is a physiological condition in which the body's insulin becomes less effective at lowering blood sugar. Excess blood sugar can cause adverse health effects such as type 2 diabetes. “Satiety” is used to refer to a homeostatic state in which a subject feels that hunger or food craving is minimized or satisfied. A satiety effector is a molecule that contributes to the minimization or satisfaction of said hunger or food craving. A molecule may be primarily a metabolic effector or primarily a satiety effector. A molecule may be both a metabolic and satiety effector, e.g., GLP-1.

[0111] “Metabolic effector molecules” and/or “satiety effector molecules” include, but are not limited to, n-acyl-phophatidylethanolamines (NAPEs), n-acyl-ethanolamines (NAEs), ghrelin receptor antagonists, peptide YY3-36, cholecystokinin (CCK) family molecules, CCK58, CCK33, CCK22, CCK8, bombesin family molecules, bombesin, gastrin releasing peptide (GRP), neuromedin B (P), glucagon, GLP-1, GLP-2, apolipoprotein A-IV, amylin, somatostatin, entero statin, oxyntomodulin, pancreatic peptide, short-chain fatty acids, butyrate, propionate, acetate, serotonin receptor agonists, nicotinamide adenine dinucleotide (NAD), nicotinamide mononucleotide (NMN), nucleotide riboside (NR), nicotinamide, and nicotinic acid (NA). Such molecules may also include compounds that inhibit a molecule that promotes metabolic disease, e.g., a single-chain variable fragment (scFv), antisense RNA, siRNA, or shRNA that inhibits dipeptidyl peptidase-4 (DPP4) or ghrelin receptor. A metabolic and/or satiety effector molecule may be encoded by a single gene, e.g., glucogon-like peptide 1 is encoded by the GLP-1 gene. Alternatively, a metabolic and/or satiety effector molecule may be synthesized by a biosynthetic pathway requiring multiple genes, e.g., propionate. These molecules may also be referred to as therapeutic molecules.

[0112] An “anti-inflammatory” or anti-inflammatory molecule” refers to a molecule that reduces, decreases, inhibits, or prevents an inflammatory response, either directly or indirectly. Non-limiting examples of anti-inflammatory molecules include short-chain fatty acids (e.g., butyrate, propionate, acetate), certain tryptophan metabolites, e.g., indoles and indole metabolites, as described herein, certain cytokines, including but not limited to, IL-10, IL-22, IL-4, IL-13, IFNa, and TGFB.

[0113] An “immune modulator” or “immune modulator molecule” refers to a molecule that modulates an inflammatory response. Non-limiting examples of immune modulator molecules include molecules that directly modulate an inflammatory response and also includes molecules that activate (stimulate or increase the activity of) or inhibit (decrease the activity of) molecules that directly modulate an inflammatory response. For example, an immune modulator can decrease levels of inflammatory growth factors and cytokines, e.g., IL-1β, IL-6, and/or TNF-α and proinflammatory signaling, e.g. NF-kappaB signaling and/or can increase levels of anti- inflammatory growth factors and cytokines, e.g., IL4, IL-10, IL-13, IFN-alpha and/or transforming growth factor-beta. Other immune modulators include, but are not limited to, short-chain fatty acids (e.g., butyrate, propionate, acetate), certain tryptophan metabolites, e.g., indoles and indole metabolites, as described herein, certain cytokines, including but not limited to, IL-10, IL-22, IL-4, IL-13, IFNa, and TGFB.

[0114] As used herein, the term “engineered bacterial cell” or “engineered bacteria” refers to a bacterial cell or bacteria that have been genetically modified from their native state. For instance, an engineered bacterial cell may have nucleotide insertions, nucleotide deletions, nucleotide rearrangements, and nucleotide modifications introduced into their DNA. These genetic modifications may be present in the chromosome of the bacteria or bacterial cell, or on a plasmid in the bacteria or bacterial cell. Engineered bacterial cells disclosed herein may comprise exogenous nucleotide sequences on plasmids. Alternatively, engineered bacterial cells may comprise exogenous nucleotide sequences stably incorporated into their chromosome.

[0115] A “programmed bacterial cell” or “programmed engineered bacterial cell” is an engineered bacterial cell that has been genetically modified from its native state to perform a specific function. In certain embodiments, the programmed or engineered bacterial cell has been modified to express one or more proteins, for example, one or more proteins that have a therapeutic activity or serve a therapeutic purpose. The programmed or engineered bacterial cell may additionally have the ability to stop growing or to destroy itself once the protein(s) of interest have been expressed.

[0116] As used herein, a “heterologous” gene or “heterologous sequence” refers to a nucleotide sequence that is not normally found in a given cell in nature. As used herein, a heterologous sequence encompasses a nucleic acid sequence that is exogenously introduced into a given cell. “Heterologous gene” includes a native gene, or fragment thereof, that has been introduced into the host cell in a form that is different from the corresponding native gene. For example, a heterologous gene may include a native coding sequence that is a portion of a chimeric gene to include a native coding sequence that is a portion of a chimeric gene to include non-native regulatory regions that is reintroduced into the host cell. A heterologous gene may also include a native gene, or fragment thereof, introduced into a non-native host cell. Thus, a heterologous gene may be foreign or native to the recipient cell; a nucleic acid sequence that is naturally found in a given cell but expresses an unnatural amount of the nucleic acid and/or the polypeptide which it encodes; and/or two or more nucleic acid sequences that are not found in the same relationship to each other in nature. As used herein, the term “endogenous gene” refers to a native gene in its natural location in the genome of an organism. As used herein, the term “transgene” refers to a gene that has been introduced into the host organism, e.g., host bacterial cell, genome.

[0117] As used herein, the term “coding region” refers to a nucleotide sequence that codes for a specific amino acid sequence. The term “regulatory sequence” refers to a nucleotide sequence located upstream (5′ non-coding sequences), within, or downstream (3′ non-coding sequences) of a coding sequence, and which influences the transcription, RNA processing, RNA stability, or translation of the associated coding sequence. Examples of regulatory sequences include, but are not limited to, promoters, translation leader sequences, effector binding sites, and stem-loop structures. In one embodiment, the regulatory sequence comprises a promoter, e.g., an FNR responsive promoter.

[0118] As used herein, a “gene cassette” or “operon” or “genetic circuit” encoding a biosynthetic pathway or catabolic pathway refers to the two or more genes that are required to produce a metabolic and/or satiety effector and/or immune modulator molecule, e.g., propionate and/or immune modulator molecule (e.g., tryptophane metabolite, e.g., indole). In addition to encoding a set of genes capable of producing said molecule, the gene cassette or operon or “genetic circuit” may also comprise additional transcription and translation elements, e.g., a ribosome binding site.

[0119] A “butyrogenic gene cassette,” “butyrate biosynthesis gene cassette,” and “butyrate operon” are used interchangeably to refer to a set of genes capable of producing butyrate in a biosynthetic pathway. Unmodified bacteria that are capable of producing butyrate via an endogenous butyrate biosynthesis pathway include, but are not limited to, Clostridium, Peptoclostridium, Fusobacterium, Butyrivibrio, Eubacterium, and Treponema. The genetically engineered bacteria of the invention may comprise butyrate biosynthesis genes from a different species, strain, or substrain of bacteria, or a combination of butyrate biosynthesis genes from different species, strains, and/or substrains of bacteria. A butyrogenic gene cassette may comprise, for example, the eight genes of the butyrate production pathway from Peptoclostridium difficile (also called Clostridium difficile): bcd2, etfB3, etfA3, thiA1, hbd, crt2, pbt, and buk, which encode butyryl-CoA dehydrogenase subunit, electron transfer flavoprotein subunit beta, electron transfer flavoprotein subunit alpha, acetyl-CoA C-acetyltransferase, 3-hydroxybutyryl-CoA dehydrogenase, crotonase, phosphate butyryltransferase, and butyrate kinase, respectively (Aboulnaga et al., 2013). One or more of the butyrate biosynthesis genes may be functionally replaced or modified, e.g., codon optimized. Peptoclostridium difficile strain 630 and strain 1296 are both capable of producing butyrate, but comprise different nucleic acid sequences for etfA3, thiA1, hbd, crt2, pbt, and buk. A butyrogenic gene cassette may comprise bcd2, etfB3, etfA3, and thiA1 from Peptoclostridium difficile strain 630, and hbd, crt2, pbt, and buk from Peptoclostridium difficile strain 1296. Alternatively, a single gene from Treponema denticola (ter, encoding trans-2-enoynl-CoA reductase) is capable of functionally replacing all three of the bcd2, etfB3, and etfA3 genes from Peptoclostridium difficile. Thus, a butyrogenic gene cassette may comprise thiA1, hbd, crt2, pbt, and buk from Peptoclostridium difficile and ter from Treponema denticola. The butyrogenic gene cassette may comprise genes for the aerobic biosynthesis of butyrate and/or genes for the anaerobic or microaerobic biosynthesis of butyrate. In another example of a butyrate gene cassette, the pbt and buk genes are replaced with tesB (e.g., from E coli). Thus a butyrogenic gene cassette may comprise ter, thiA1, hbd, crt2, and tesB.

[0120] Likewise, a “propionate gene cassette” or “propionate operon” refers to a set of genes capable of producing propionate in a biosynthetic pathway. Unmodified bacteria that are capable of producing propionate via an endogenous propionate biosynthesis pathway include, but are not limited to, Clostridium propionicum, Megasphaera elsdenii, and Prevotella ruminicola. The genetically engineered bacteria of the invention may comprise propionate biosynthesis genes from a different species, strain, or substrain of bacteria, or a combination of propionate biosynthesis genes from different species, strains, and/or substrains of bacteria. In some embodiments, the propionate gene cassette comprises acrylate pathway propionate biosynthesis genes, e.g., pct, lcdA, lcdB, lcdC, etfA, acrB, and acrC, which encode propionate CoA-transferase, lactoyl-CoA dehydratase A, lactoyl-CoA dehydratase B, lactoyl-CoA dehydratase C, electron transfer flavoprotein subunit A, acryloyl-CoA reductase B, and acryloyl-CoA reductase C, respectively (Hetzel et al., 2003, Selmer et al., 2002, and Kandasamy 2012 Engineering Escherichia coli with acrylate pathway genes for propionic acid synthesis and its impact on mixed-acid fermentation). This operon catalyses the reduction of lactate to propionate. Dehydration of (R)-lactoyl-CoA leads to the production of the intermediate acryloyl-CoA by lactoyl-CoA dehydratase (LcdABC). Acrolyl-CoA is converted to propionyl-CoA by acrolyl-CoA reductase (EtfA, AcrBC). In some embodiments, the rate limiting step catalyzed by the enzymes encoded by etfA, acrB and acrC, are replaced by the acuI gene from R. sphaeroides. This gene product catalyzes the NADPH-dependent acrylyl-CoA reduction to produce propionyl-CoA (Acrylyl-Coenzyme A Reductase, an Enzyme Involved in the Assimilation of 3-Hydroxypropionate by Rhodobacter sphaeroides; Asao 2013). Thus the propionate cassette comprises pct, lcdA, lcdB, lcdC, and acuI. In another embodiment, the homolog of Acul in E coli, YhdH is used (see.e.g., Structure of Escherichia coli YhdH, a putative quinone oxidoreductase. Sulzenbacher 2004). This the propionate cassette comprises pct, lcdA, lcdB, lcdC, and yhdH. In alternate embodiments, the propionate gene cassette comprises pyruvate pathway propionate biosynthesis genes (see, e.g., Tseng et al., 2012), e.g., thrAfbr, thrB, thrC, ilvAfbr, aceE, aceF, and 1pd, which encode homoserine dehydrogenase 1, homoserine kinase, L-threonine synthase, L-threonine dehydratase, pyruvate dehydrogenase, dihydrolipoamide acetyltrasferase, and dihydrolipoyl dehydrogenase, respectively. In some embodiments, the propionate gene cassette further comprises tesB, which encodes acyl-CoA thioesterase.

[0121] In another example of a propionate gene cassette comprises the genes of the Sleeping Beauty Mutase operon, e.g., from E. coli (sbm, ygfD, ygfG, ygfH). Recently, this pathway has been considered and utilized for the high yield industrial production of propionate from glycerol (Akawi et al., Engineering Escherichia coli for high-level production of propionate; J Ind Microbiol Biotechnol (2015) 42:1057-1072, the contents of which is herein incorporated by reference in its entirety). In addition, as described herein, it has been found that this pathway is also suitable for production of proprionate from glucose, e.g. by the genetically engineered bacteria of the disclosure. The SBM pathway is cyclical and composed of a series of biochemical conversions forming propionate as a fermentative product while regenerating the starting molecule of succinyl-CoA. Sbm (methylmalonyl-CoA mutase) converts succinyl CoA to L-methylmalonylCoA, YgfD is a Sbm-interacting protein kinase with GTPase activity, ygfG (methylmalonylCoA decarboxylase) converts L-methylmalonylCoA into PropionylCoA, and ygfH (propionyl-CoA/succinylCoA transferase) converts propionylCoA into propionate and succinate into succinylCoA (Sleeping beauty mutase (sbm) is expressed and interacts with ygfd in Escherichia coli; Froese 2009). This pathway is very similar to the oxidative propionate pathway of Propionibacteria, which also converts succinate to propionate. Succinyl-CoA is converted to R-methylmalonyl-CoA by methymalonyl-CoA mutase (mutAB). This is in turn converted to S-methylmalonyl-CoA via methymalonyl-CoA epimerase (GI:18042134). There are three genes which encode methylmalonyl-CoA carboxytransferase (mmdA, PFREUD 18870, bccp) which converts methylmalonyl-CoA to propionyl-CoA.

[0122] The propionate gene cassette may comprise genes for the aerobic biosynthesis of propionate and/or genes for the anaerobic or microaerobic biosynthesis of propionate. One or more of the propionate biosynthesis genes may be functionally replaced or modified, e.g., codon optimized.

[0123] An “acetate gene cassette” or “acetate operon” refers to a set of genes capable of producing acetate in a biosynthetic pathway. Bacteria “synthesize acetate from a number of carbon and energy sources,” including a variety of substrates such as cellulose, lignin, and inorganic gases, and utilize different biosynthetic mechanisms and genes, which are known in the art (Ragsdale et al., 2008). The genetically engineered bacteria of the invention may comprise acetate biosynthesis genes from a different species, strain, or substrain of bacteria, or a combination of acetate biosynthesis genes from different species, strains, and/or substrains of bacteria. Escherichia coli are capable of consuming glucose and oxygen to produce acetate and carbon dioxide during aerobic growth (Kleman et al., 1994). Several bacteria, such as Acetitomaculum, Acetoanaerobium, Acetohalobium, Acetonema, Balutia, Butyribacterium, Clostridium, Moorella, Oxobacter, Sporomusa, and Thermoacetogenium, are acetogenic anaerobes that are capable of converting CO or CO₂+H₂ into acetate, e.g., using the Wood-Ljungdahl pathway (Schiel-Bengelsdorf et al, 2012). Genes in the Wood-Ljungdahl pathway for various bacterial species are known in the art. The acetate gene cassette may comprise genes for the aerobic biosynthesis of acetate and/or genes for the anaerobic or microaerobic biosynthesis of acetate. One or more of the acetate biosynthesis genes may be functionally replaced or modified, e.g., codon optimized.

[0124] Each gene or gene cassette may be present on a plasmid or bacterial chromosome. In addition, multiple copies of any gene, gene cassette, or regulatory region may be present in the bacterium, wherein one or more copies of the gene, gene cassette, or regulatory region may be mutated or otherwise altered as described herein. In some embodiments, the genetically engineered bacteria are engineered to comprise multiple copies of the same gene, gene cassette, or regulatory region in order to enhance copy number or to comprise multiple different components of a gene cassette performing multiple different functions.

[0125] Each gene or gene cassette may be operably linked to a promoter that is induced under low-oxygen conditions. “Operably linked” refers a nucleic acid sequence, e.g., a gene or gene cassette for producing a metabolic and/or satiety effector and/or immune modulator molecule, that is joined to a regulatory region sequence in a manner which allows expression of the nucleic acid sequence, e.g., acts in cis. A regulatory region is a nucleic acid that can direct transcription of a gene of interest and may comprise promoter sequences, enhancer sequences, response elements, protein recognition sites, inducible elements, promoter control elements, protein binding sequences, 5′ and 3′ untranslated regions, transcriptional start sites, termination sequences, polyadenylation sequences, and introns.

[0126] A “directly inducible promoter” refers to a regulatory region, wherein the regulatory region is operably linked to a gene or a gene cassette encoding a biosynthetic pathway for producing a metabolic and/or satiety effector molecule, e.g. propionate, and/or immune modulator. In the presence of an inducer of said regulatory region, a metabolic and/or satiety effector and/or immune modulator molecule is expressed. An “indirectly inducible promoter” refers to a regulatory system comprising two or more regulatory regions, for example, a first regulatory region that is operably linked to a gene encoding a first molecule, e.g., a transcription factor, which is capable of regulating a second regulatory region that is operably linked to a gene or a gene cassette encoding a biosynthetic pathway for producing a metabolic and/or satiety effector molecule, e.g. propionate, and/or immune modulator. In the presence of an inducer of the first regulatory region, the second regulatory region may be activated or repressed, thereby activating or repressing production of propionate. Both a directly inducible promoter and an indirectly inducible promoter are encompassed by “inducible promoter.”

[0127] “Exogenous environmental condition(s)” or “environmental conditions” refer to settings or circumstances under which the promoter described herein is directly or indirectly induced. The phrase is meant to refer to the environmental conditions external to the engineered microorganism, but endogenous or native to the host subject environment. Thus, “exogenous” and “endogenous” may be used interchangeably to refer to environmental conditions in which the environmental conditions are endogenous to a mammalian body, but external or exogenous to an intact microorganism cell. In some embodiments, the exogenous environmental conditions are specific to the gut of a mammal. In some embodiments, the exogenous environmental conditions are specific to the upper gastrointestinal tract of a mammal. In some embodiments, the exogenous environmental conditions are specific to the lower gastrointestinal tract of a mammal. In some embodiments, the exogenous environmental conditions are specific to the small intestine of a mammal. In some embodiments, the exogenous environmental conditions are low-oxygen, microaerobic, or anaerobic conditions, such as the environment of the mammalian gut. In some embodiments, exogenous environmental conditions refer to the presence of molecules or metabolites that are specific to the mammalian gut in a healthy or disease-state, e.g., propionate. In some embodiments, the exogenous environmental condition is a tissue-specific or disease-specific metabolite or molecule(s). In some embodiments, the exogenous environmental condition is a low-pH environment. In some embodiments, the genetically engineered microorganism of the disclosure comprises a pH-dependent promoter. In some embodiments, the genetically engineered microorganism of the disclosure comprises an oxygen level-dependent promoter. In some aspects, bacteria have evolved transcription factors that are capable of sensing oxygen levels. Different signaling pathways may be triggered by different oxygen levels and occur with different kinetics.

[0128] As used herein, “exogenous environmental conditions” or “environmental conditions” also refers to settings or circumstances or environmental conditions external to the engineered microorganism, which relate to in vitro culture conditions of the microorganism. “Exogenous environmental conditions” may also refer to the conditions during in vitro growth, production, and manufacture of the organism. Such conditions include aerobic culture conditions, anaerobic culture conditions, low oxygen culture conditions and other conditions under set oxygen concentrations. Such conditions also include the presence of a chemical and/or nutritional inducer, such as tetracycline, arabinose, IPTG, rhamnose, and the like in the culture medium. Such conditions also include the temperatures at which the microorganisms are grown prior to in vivo administration. For example, using certain promoter systems, certain temperatures are permissive to expression of a payload, while other temperatures are non-permissive. Oxygen levels, temperature and media composition influence such exogenous environmental conditions. Such conditions affect proliferation rate, rate of induction of the protein of interest and overall viability and metabolic activity of the strain during strain production.

[0129] In some embodiments, the gene or gene cassette for producing a metabolic and/or satiety effector and/or immune modulator molecule is operably linked to an oxygen level-dependent regulatory region such that the effector molecule is expressed in low-oxygen, microaerobic, or anaerobic conditions. For example, the oxygen level-dependent regulatory region is operably linked to a propionate gene cassette; in low oxygen conditions, the oxygen level-dependent regulatory region is activated by a corresponding oxygen level-sensing transcription factor, thereby driving expression of the propionate gene cassette. Examples of oxygen level-dependent transcription factors and corresponding promoters and/or regulatory regions include, but are not limited to, FNR, ANR, and DNR. Corresponding FNR-responsive promoters, ANR-responsive promoters, and DNR-responsive promoters are known in the art (see, e.g., Castiglione et al., 2009; Eiglmeier et al., 1989; Galimand et al., 1991; Hasegawa et al., 1998; Hoeren et al., 1993; Salmon et al., 2003), and non-limiting examples are shown in Table 1.

TABLE 1
Examples of transcription factors and
responsive genes and regulatory regions

| Transcription | Examples of responsive genes, |
|---|---|
| Factor | promoters, and/or regulatory regions: |
| FNR | nirB, ydfZ, pdhR, focA, ndH, hlyE, narK, |
| | narX, narG, yfiD, tdcD |
| | Table 4 |
| ANR | arcDABC |
| DNR | norb, norC |

[0130] As used herein, a “non-native” nucleic acid sequence refers to a nucleic acid sequence not normally present in a bacterium, e.g., an extra copy of an endogenous sequence, or a heterologous sequence such as a sequence from a different species, strain, or substrain of bacteria, or a sequence that is modified and/or mutated as compared to the unmodified sequence from bacteria of the same subtype. In some embodiments, the non-native nucleic acid sequence is a synthetic, non-naturally occurring sequence (see, e.g., Purcell et al., 2013). The non-native nucleic acid sequence may be a regulatory region, a promoter, a gene, and/or one or more genes in gene cassette. In some embodiments, “non-native” refers to two or more nucleic acid sequences that are not found in the same relationship to each other in nature. The non-native nucleic acid sequence may be present on a plasmid or chromosome. In some embodiments, the genetically engineered bacteria of the invention comprise a gene cassette that is operably linked to a directly or indirectly inducible promoter that is not associated with said gene cassette in nature, e.g., a FNR-responsive promoter operably linked to a propionate gene cassette.

[0131] “Constitutive promoter” refers to a promoter that is capable of facilitating continuous transcription of a coding sequence or gene under its control and/or to which it is operably linked. Constitutive promoters and variants are well known in the art and include, but are not limited to, BBa_J23100, a constitutive Escherichia coli σ^{S} promoter (e.g., an osmY promoter (International Genetically Engineered Machine (iGEM) Registry of Standard Biological Parts Name BBa_J45992; BBa_J45993)), a constitutive Escherichia coli σ³² promoter (e.g., htpG heat shock promoter (BBa_J45504)), a constitutive Escherichia coli σ⁷⁰ promoter (e.g., lacq promoter (BBa_J54200; BBa_J56015), E. coli CreABCD phosphate sensing operon promoter (BBa_J64951), GlnRS promoter (BBa_K088007), lacZ promoter (BBa_K119000; BBa_K119001); M13K07 gene I promoter (BBa_M13101); M13K07 gene II promoter (BBa_M13102), M13K07 gene III promoter (BBa_M13103), M13K07 gene IV promoter (BBa_M13104), M13K07 gene V promoter (BBa_M13105), M13K07 gene VI promoter (BBa_M13106), M13K07 gene VIII promoter (BBa_M13108), M13110 (BBa_M13110)), a constitutive Bacillus subtilis σ^{A} promoter (e.g., promoter veg (BBa_K143013), promoter 43 (BBa_K143013), P_{liaG} (BBa_K823000), P_{lepA} (BBa_K823002), Pveg (BBa_K823003)), a constitutive Bacillus subtilis σ^{B} promoter (e.g., promoter ctc (BBa_K143010), promoter gsiB (BBa_K143011)), a Salmonella promoter (e.g., Pspv2 from Salmonella (BBa_K112706), Pspv from Salmonella (BBa_K112707)), a bacteriophage T7 promoter (e.g., T7 promoter (BBa_I712074; BBa_I719005; BBa_J34814; BBa_J64997; BBa_K113010; BBa_K113011; BBa_K113012; BBa_R0085; BBa_R0180; BBa_R0181; BBa_R0182; BBa_R0183; BBa_Z0251; BBa_Z0252; BBa_Z0253)), and a bacteriophage SP6 promoter (e.g., SP6 promoter (BBa_J64998)).

[0132] “Gut” refers to the organs, glands, tracts, and systems that are responsible for the transfer and digestion of food, absorption of nutrients, and excretion of waste. In humans, the gut comprises the gastrointestinal (GI) tract, which starts at the mouth and ends at the anus, and additionally comprises the esophagus, stomach, small intestine, and large intestine. The gut also comprises accessory organs and glands, such as the spleen, liver, gallbladder, and pancreas. The upper gastrointestinal tract comprises the esophagus, stomach, and duodenum of the small intestine. The lower gastrointestinal tract comprises the remainder of the small intestine, i.e., the jejunum and ileum, and all of the large intestine, i.e., the cecum, colon, rectum, and anal canal. Bacteria can be found throughout the gut, e.g., in the gastrointestinal tract, and particularly in the intestines.

[0133] “Microorganism” refers to an organism or microbe of microscopic, submicroscopic, or ultramicroscopic size that typically consists of a single cell. Examples of microrganisms include bacteria, viruses, parasites, fungi, certain algae, yeast, and protozoa. In some aspects, the microorganism is engineered (“engineered microorganism”) to produce one or more therapeutic molecules. In certain aspects, the microorganism is engineered to import and/or catabolize certain toxic metabolites, substrates, or other compounds from its environment, e.g., the gut. In certain aspects, the microorganism is engineered to synthesize certain beneficial metabolites, molecules, or other compounds (synthetic or naturally occurring) and release them into its environment. In certain embodiments, the engineered microorganism is an engineered bacterium. In certain embodiments, the engineered microorganism is an engineered virus.

[0134] “Non-pathogenic bacteria” refer to bacteria that are not capable of causing disease or harmful responses in a host. In some embodiments, non-pathogenic bacteria are Gram-negative bacteria. In some embodiments, non-pathogenic bacteria are Gram-positive bacteria. In some embodiments, non-pathogenic bacteria are commensal bacteria, which are present in the indigenous microbiota of the gut. Examples of non-pathogenic bacteria include, but are not limited to Bacillus, Bacteroides, Bifidobacterium, Brevibacteria, Clostridium, Enterococcus, Escherichia, Lactobacillus, Lactococcus, Saccharomyces, and Staphylococcus, e.g., Bacillus coagulans, Bacillus subtilis, Bacteroides fragilis, Bacteroides subtilis, Bacteroides thetaiotaomicron, Bifidobacterium bifidum, Bifidobacterium infantis, Bifidobacterium lactis, Bifidobacterium longum, Clostridium butyricum, Enterococcus faecium, Escherichia coli, Lactobacillus acidophilus, Lactobacillus bulgaricus, Lactobacillus casei, Lactobacillus johnsonii, Lactobacillus paracasei, Lactobacillus plantarum, Lactobacillus reuteri, Lactobacillus rhamnosus, Lactococcus lactis, and Saccharomyces boulardii (Sonnenborn et al., 2009; Dinleyici et al., 2014; U.S. Pat. No. 6,835,376; U.S. Pat. No. 6,203,797; U.S. Pat. No. 5,589,168; U.S. Pat. No. 7,731,976). Naturally pathogenic bacteria may be genetically engineered to provide reduce or eliminate pathogenicity.

[0135] “Probiotic” is used to refer to live, non-pathogenic microorganisms, e.g., bacteria, which can confer health benefits to a host organism that contains an appropriate amount of the microorganism. In some embodiments, the host organism is a mammal. In some embodiments, the host organism is a human. Some species, strains, and/or subtypes of non-pathogenic bacteria are currently recognized as probiotic. Examples of probiotic bacteria include, but are not limited to, Bifidobacteria, Escherichia, Lactobacillus, and Saccharomyces, e.g., Bifidobacterium bifidum, Enterococcus faecium, Escherichia coli, Escherichia coli strain Nissle, Lactobacillus acidophilus, Lactobacillus bulgaricus, Lactobacillus paracasei, Lactobacillus plantarum, and Saccharomyces boulardii (Dinleyici et al., 2014; U.S. Pat. No. 5,589,168; U.S. Pat. No. 6,203,797; U.S. Pat. No. 6,835,376). Non-pathogenic bacteria may be genetically engineered to enhance or improve desired biological properties, e.g., survivability. Non-pathogenic bacteria may be genetically engineered to provide probiotic properties. Probiotic bacteria may be genetically engineered to enhance or improve probiotic properties.

[0136] As used herein, the terms “secretion system” or “secretion protein” refers to a native or non-native secretion mechanism capable of secreting or exporting a biomolecule, e.g., polypeptide from the microbial, e.g., bacterial cytoplasm. The secretion system may comprise a single protein or may comprise two or more proteins assembled in a complex e.g.,HlyBD. Non-limiting examples of secretion systems for gram negative bacteria include the modified type III flagellar, type I (e.g., hemolysin secretion system), type II, type IV, type V, type VI, and type VII secretion systems, resistance-nodulation-division (RND) multi-drug efflux pumps, various single membrane secretion systems. Non-liming examples of secretion systems for gram positive bacteria include Sec and TAT secretion systems. In some embodiments, the polypeptide to be secreted include a “secretion tag” of either RNA or peptide origin to direct the polypeptide to specific secretion systems. In some embodiments, the secretion system is able to remove this tag before secreting the polyppetide from the engineered bacteria. For example, in Type V auto-secretion-mediated secretion the N-terminal peptide secretion tag is removed upon translocation of the “passenger” peptide from the cytoplasm into the periplasmic compartment by the native Sec system. Further, once the auto-secretor is translocated across the outer membrane the C-terminal secretion tag can be removed by either an autocatalytic or protease-catalyzed e.g., OmpT cleavage thereby releasing the antinflammatory or barrier enhancer molecule(s) into the extracellular milieu. In some embodiments, the secretion system involves the generation of a “leaky” or de-stabilized outer membrane, which may be accomplished by deleting or mutagenizing genes responsible for tethering the outer membrane to the rigid peptidoglycan skeleton, including for example, lpp, ompC, ompA, ompF, tolA, tolB, pal, degS, degP, and nlpl. Lpp functions as the primary ‘staple’ of the bacterial cell wall to the peptidoglycan. TolA-PAL and OmpA complexes function similarly to Lpp and are other deletion targets to generate a leaky phenotype. Additionally, leaky phenotypes have been observed when periplasmic proteases, such as degS, degP or nlpl, are deactivated. Thus, in some embodiments, the engineered bacteria have one or more deleted or mutated membrane genes, e.g., selected from 1pp, ompA, ompA, ompF, tolA, tolB, and pal genes. In some embodiments, the engineered bacteria have one or more deleted or mutated periplasmic protease genes, e.g., selected from degS, degP, and nlpl. In some embodiments, the engineered bacteria have one or more deleted or mutated gene(s), selected from lpp, ompA, ompA, ompF, tolA, tolB, pal, degS, degP, and nlpl genes.

[0137] As used herein, the term “modulate” and its cognates means to alter, regulate, or adjust positively or negatively a molecular or physiological readout, outcome, or process, to effect a change in said readout, outcome, or process as compared to a normal, average, wild-type, or baseline measurement. Thus, for example, “modulate” or “modulation” includes up-regulation and down-regulation. A non-limiting example of modulating a readout, outcome, or process is effecting a change or alteration in the normal or baseline functioning, activity, expression, or secretion of a biomolecule (e.g. a protein, enzyme, cytokine, growth factor, hormone, metabolite, short chain fatty acid, or other compound). Another non-limiting example of modulating a readout, outcome, or process is effecting a change in the amount or level of a biomolecule of interest, e.g. in the serum and/or the gut lumen. In another non-limiting example, modulating a readout, outcome, or process relates to a phenotypic change or alteration in one or more disease symptoms. Thus, “modulate” is used to refer to an increase, decrease, masking, altering, overriding or restoring the normal functioning, activity, or levels of a readout, outcome or process (e.g, biomolecule of interest, and/or molecular or physiological process, and/or a phenotypic change in one or more disease symptoms).

[0138] As used herein, “stably maintained” or “stable” bacterium is used to refer to a bacterial host cell carrying non-native genetic material, e.g., a propionate gene cassette, which is incorporated into the host genome or propagated on a self-replicating extra-chromosomal plasmid, such that the non-native genetic material is retained, expressed, and/or propagated. The stable bacterium is capable of survival and/or growth in vitro, e.g., in medium, and/or in vivo, e.g., in the gut. For example, the stable bacterium may be a genetically modified bacterium comprising a propionate gene cassette, in which the plasmid or chromosome carrying the propionate gene cassette is stably maintained in the host cell, such that the gene cassette can be expressed in the host cell, and the host cell is capable of survival and/or growth in vitro and/or in vivo.

[0139] As used herein, the term “treat” and its cognates refer to an amelioration of a disease or disorder, or at least one discernible symptom thereof. In another embodiment, “treat” refers to an amelioration of at least one measurable physical parameter, not necessarily discernible by the patient. In another embodiment, “treat” refers to inhibiting the progression of a disease or disorder, either physically (e.g., stabilization of a discernible symptom), physiologically (e.g., stabilization of a physical parameter), or both. In another embodiment, “treat” refers to slowing the progression or reversing the progression of a disease or disorder. As used herein, “prevent” and its cognates refer to delaying the onset or reducing the risk of acquiring a given disease or disorder.

[0140] Those in need of treatment may include individuals already having a particular medical disorder, as well as those at risk of having, or who may ultimately acquire the disorder. The need for treatment is assessed, for example, by the presence of one or more risk factors associated with the development of a disorder, the presence or progression of a disorder, or likely receptiveness to treatment of a subject having the disorder. Treating metabolic diseases may encompass reducing or eliminating associated symptoms, e.g., weight gain, and does not necessarily encompass the elimination of the underlying disease or disorder, e.g., congenital leptin deficiency. Treating the diseases described herein may encompass increasing levels of propionate, increasing levels of butyrate, and increasing GLP-1, and/or modulating levels of tryptophan and/or its metabolites (e.g., kynurenine), and does not necessarily encompass the elimination of the underlying disease.

[0141] As used herein a “pharmaceutical composition” refers to a preparation of genetically engineered bacteria of the invention with other components such as a physiologically suitable carrier and/or excipient.

[0142] The phrases “physiologically acceptable carrier” and “pharmaceutically acceptable carrier” which may be used interchangeably refer to a carrier or a diluent that does not cause significant irritation to an organism and does not abrogate the biological activity and properties of the administered bacterial compound. An adjuvant is included under these phrases.

[0143] The term “excipient” refers to an inert substance added to a pharmaceutical composition to further facilitate administration of an active ingredient. Examples include, but are not limited to, calcium bicarbonate, calcium phosphate, various sugars and types of starch, cellulose derivatives, gelatin, vegetable oils, polyethylene glycols, and surfactants, including, for example, polysorbate 20.

[0144] The terms “therapeutically effective dose” and “therapeutically effective amount” are used to refer to an amount of a compound that results in prevention, delay of onset of symptoms, or amelioration of symptoms of a condition, e.g., obesity. A therapeutically effective amount may, for example, be sufficient to treat, prevent, reduce the severity, delay the onset, and/or reduce the risk of occurrence of one or more symptoms of a metabolic disease. A therapeutically effective amount, as well as a therapeutically effective frequency of administration, can be determined by methods known in the art and discussed below.

[0145] The articles “a” and “an,” as used herein, should be understood to mean “at least one,” unless clearly indicated to the contrary.

[0146] The phrase “and/or,” when used between elements in a list, is intended to mean either (1) that only a single listed element is present, or (2) that more than one element of the list is present. For example, “A, B, and/or C” indicates that the selection may be A alone; B alone; C alone; A and B; A and C; B and C; or A, B, and C. The phrase “and/or” may be used interchangeably with “at least one of” or “one or more of” the elements in a list.

[0147] Bacteria

[0148] The genetically engineered bacteria of the invention comprise a gene or gene cassette for producing a non-native metabolic and/or satiety effector and/or immune modulator molecule, wherein the gene or gene cassette is operably linked to a directly or indirectly inducible promoter that is controlled by exogenous environmental condition(s). In some embodiments, the genetically engineered bacteria are non-pathogenic bacteria. In some embodiments, the genetically engineered bacteria are commensal bacteria. In some embodiments, the genetically engineered bacteria are probiotic bacteria. In some embodiments, non-pathogenic bacteria are Gram-negative bacteria. In some embodiments, non-pathogenic bacteria are Gram-positive bacteria. In some embodiments, the genetically engineered bacteria are naturally pathogenic bacteria that are modified or mutated to reduce or eliminate pathogenicity. Exemplary bacteria include, but are not limited to Bacillus, Bacteroides, Bifidobacterium, Brevibacteria, Clostridium, Enterococcus, Escherichia coli, Lactobacillus, Lactococcus, Saccharomyces, and Staphylococcus, e.g., Bacillus coagulans, Bacillus subtilis, Bacteroides fragilis, Bacteroides subtilis, Bacteroides thetaiotaomicron, Bifidobacterium bifidum, Bifidobacterium infantis, Bifidobacterium lactis, Bifidobacterium longum, Clostridium butyricum, Enterococcus faecium, Lactobacillus acidophilus, Lactobacillus bulgaricus, Lactobacillus casei, Lactobacillus johnsonii, Lactobacillus paracasei, Lactobacillus plantarum, Lactobacillus reuteri, Lactobacillus rhamnosus, Lactococcus lactis, and Saccharomyces boulardii. In certain embodiments, the genetically engineered bacteria are selected from the group consisting of Bacteroides fragilis, Bacteroides thetaiotaomicron, Bacteroides subtilis, Bifidobacterium bifidum, Bifidobacterium infantis, Bifidobacterium lactis, Clostridium butyricum, Escherichia coli Nissle, Lactobacillus acidophilus, Lactobacillus plantarum, Lactobacillus reuteri, and Lactococcus lactis.

[0149] In some embodiments, the genetically engineered bacteria are Escherichia coli strain Nissle 1917 (E. coli Nissle), a Gram-positive bacterium of the Enterobacteriaceae family that “has evolved into one of the best characterized probiotics” (Ukena et al., 2007). The strain is characterized by its complete harmlessness (Schultz, 2008), and has GRAS (generally recognized as safe) status (Reister et al., 2014, emphasis added). Genomic sequencing confirmed that E. coli Nissle lacks prominent virulence factors (e.g., E. coli α-hemolysin, P-fimbrial adhesins) (Schultz, 2008). In addition, it has been shown that E. coli Nissle does not carry pathogenic adhesion factors, does not produce any enterotoxins or cytotoxins, is not invasive, and is not uropathogenic (Sonnenborn et al., 2009). As early as in 1917, E. coli Nissle was packaged into medicinal capsules, called Mutaflor, for therapeutic use. E. coli Nissle has since been used to treat ulcerative colitis in humans in vivo (Rembacken et al., 1999), to treat inflammatory bowel disease, Crohn's disease, and pouchitis in humans in vivo (Schultz, 2008), and to inhibit enteroinvasive Salmonella, Legionella, Yersinia, and Shigella in vitro (Altenhoefer et al., 2004). It is commonly accepted that E. coli Nissle's “therapeutic efficacy and safety have convincingly been proven” (Ukena et al., 2007). In a recent study in non-human primates, Nissle was well tolerated by female cynomolgus monkeys after 28 days of daily NG dose administration at doses up to 1×1012 CFU/animal. No Nissle related mortality occurred and no Nissle related effects were identified upon clinical observation, body weight, and clinical pathology assessment (see, e.g., PCT/US16/34200).

[0150] One of ordinary skill in the art would appreciate that the genetic modifications disclosed herein may be adapted for other species, strains, and subtypes of bacteria. It is known, for example, that “the clostridial butyrogenic pathway [genes] . . . are widespread in the genome-sequenced clostridia and related species” (Aboulnaga et al., 2013). Furthermore, genes from one or more different species of bacteria can be introduced into one another, e.g., the butyrogenic genes from Peptoclostridium difficile have been expressed in Escherichia coli (Aboulnaga et al., 2013).

[0151] Unmodified E. coli Nissle and the genetically engineered bacteria of the invention may be destroyed, e.g., by defense factors in the gut or blood serum (Sonnenborn et al., 2009). Thus the genetically engineered bacteria may require continued administration. Residence time in vivo may be calculated for the genetically engineered bacteria.

[0152] In certain embodiments, the payload(s) described below are expressed in one species, strain, or subtype of genetically engineered bacteria. In alternate embodiments, the payload is expressed in two or more species, strains, and/or subtypes of genetically engineered bacteria.

[0153] Metabolic Diseases

### NASH

[0154] Non-alcoholic steatohepatitis (NASH) is a severe form of non-alcoholic fatty liver disease (NAFLD), where excess fat accumulation in the liver results in chronic inflammation and damage. Nonalcoholic fatty liver disease is a component of metabolic syndrome and a spectrum of liver disorders ranging from simple steatosis to nonalcoholic steatohepatitis (NASH). Simple liver steatosis is defined as a benign form of NAFLD with minimal risk of progression, in contrast to NASH, which tends to progress to cirrhosis in up to 20% of patients and can subsequently lead to liver failure or hepatocellular carcinoma. NASH affects approximately 3-5% of the population in America, especially in those identified as obese. NASH is characterized by such abnormalities as advanced lipotoxic metabolites, pro-inflammatory substrate, fibrosis, and increased hepatic lipid deposition. If left untreated, NASH can lead to cirrhosis, liver failure, and hepatocellular carcinoma.

[0155] Although patients diagnosed with alcoholic steatohepatitis demonstrate similar symptoms and liver damage, NASH develops in individuals who do not consume alcohol, and the underlying causes of NASH are unknown. Hepatic steatosis occurs when the amount of imported and synthesized lipids exceeds the export or catabolism in hepatocytes. An excess intake of fat or carbohydrate is the main cause of hepatic steatosis. NAFLD patients exhibit signs of liver inflammation and increased hepatic lipid accumulation. In addition, the development of NAFLD in obese individuals is closely associated with insulin resistance and other metabolic disorders and thus might be of clinical relevance). Therfore, Possible causative factors include insulin resistance, cytokine imbalance (specifically, an increase in the tumor necrosis factor-alpha (TNF-α)/adiponectin ratio), and oxidative stress resulting from mitochondrial abnormalities.

[0156] Currently, there is no accepted approach to treating NASH. Therapy generally involves treating known risk factors such as correction of obesity through diet and exercise, treating hyperglycemia through diet and insulin, avoiding alcohol consumption, and avoiding unnecessary medication. In animal models, administration of butyrate has been shown to reduce hepatic steatosis, inflammation, and fat deposition (see, for example, Jin et al., British J. Nutrition, 114(11):1745-1755, 2015 and Endo et al., PLoS One, 8(5):e63388, 2013). Colonic propionate delivery has also been shown to reduce intrahepatocellular lipid content in NASH patients, including improvements in weight gain and intra-abdominal fat deposition (see, for example, Chambers et al., Gut, gutjnl-2014), and GLP-1 administration has been shown to reduce the degree of lipotoxic metabolites and pro-inflammatory substrates, both of which have been shown to speed NASH development, as well as reduce hepatic lipid deposition (see, for example, Bernsmeier et al., PLoS One, 9(1):e87488, 2014 and Armstrong et al., J. Hepatol., 2015).

[0157] The liver has both an arterial and venous blood supply, with the majority of hepatic blood flow coming from the gut via the portal vein. In NASH the liver is exposed to potentially harmful substances derived from the gut (increased perability and reduced intestinal integrity), including translocated bacteria, LPS and endotoxins as well as secreted cytokines. Translocated microbial products might contribute to the pathogenesis of fatty liver disease by several mechanisms, including stimulating pro-inflammatory and profibrotic pathways via a range of cytokines. For example, butyrate and other SCFA, e.g., derived from the microbiota, are known to promote maintaining intestinal integrity.

[0158] The role of bile acids in the pathogenesis of NAFLD and NASH has been extensively studied (Leung et al., The Role Of The Gut Microbiota In NAFLD; Nature Reviews I Gastroenterology & Hepatology). For example, in one study study, manipulation of the gut microbiota changed intestinal bile acid composition leading to intestinal antagonism of FRX, the master regulator of bile acid metabolism. This FXR antagonism reduced ceramide synthesis and de novo lipogenesis in the liver (Jiang, C. et al. Intestinal farnesoid X receptor signaling promotes nonalcoholic fatty liver disease. J. Clin. Invest. 125, 386-402 (2015)).

[0159] Studies have also suggested that rapid weight loss through bariatric surgery (e.g. gastric bypass) is effective in decreasing steatosis, hepatic inflammation, and fibrosis. Other treatments have involved using anti-diabetic medications such as metformin, rosiglitazone, and pioglitazone. Though inconclusive, the studies suggest that the medications stimulate insulin sensitivity in NASH patients, thus alleviating liver damage. In cases were NASH has resulted in advanced cirrhosis, the only treatment is a liver transplant. Regardless, no current treatments are wholly determinative or reliable for treating NASH. Therefore, a need exists for improved therapies and treatments of NASH.

[0160] In some embodiments, the genetically engineered bacteria are useful for the prevention, treatment, and/or management of NAFLD and/or NASH. In some embodiments, the genetically engineered bacteria comprise circuits which reduce inflammation. In some embodiments, the circuits stimulate insulin secretion and/or promote satiety.

[0161] In some embodiments, the genetically engineered bacteria comprise one or more gene cassettes for the production of short-chain fatty acids, e.g., butyrate and/or propionate, and/or acetate. In some embodiments, the genetically engineered bacteria comprise one or more gene cassettes for the production of GLP-1. In some embodiments, the genetically engineered bacteria comprise one or more gene cassettes for the production of short-chain fatty acids, e.g., butyrate and/or propionate, and/or acetate and further comprise one or more gene cassettes for the production of GLP-1. In some embodiments, the genetically engineered bacteria comprise one or more gene cassettes for the production of short-chain fatty acids, e.g., butyrate and/or propionate for the treatment of NAFLD and/or NASH. In some embodiments, the genetically engineered bacteria comprise one or more gene cassettes for the increase of bile salt catabolism, including but not limited to bile salt hydrolase or bile salt transporter producing cassettes.

[0162] In certain embodiments, the genetically engineered bacteria comprise one or more gene cassettes as described herein, which modulate typtophan levels in the patient, e.g., in the serum and/or in the gut. In certain embodiments, the genetically engineered bacteria comprise one or more gene cassettes as described herein, which modulate kynurenine levels in the patient, e.g., in the serum and/or in the gut. In certain embodiments, the genetically engineered bacteria comprise one or more gene cassettes as described herein, which modulate levels of downstream kynurenine metabolites described herein in the patient, e.g., in the serum and/or in the gut. In certain embodiments, the genetically engineered bacteria comprise one or more gene cassettes as described herein, which modulate levels of downstream indole tryptophan metabolites described herein, including, but not limited to those listed in Table 13, FIG. 34, FIG. 35A, FIG. 35B, and elsewhere herein, in the patient, e.g., in the serum and/or in the gut.

[0163] In certain embodiments, the genetically engineered bacteria comprise one or more gene cassettes as described herein, which modulate the TRP/KYN ratio in the patient, e.g., in the serum and/or in the gut. In some embodiments, the genetically engineered bacteria comprise gene cassettes which modulate the ratios of tryptophan to one or more indole tryptophan metabolites, including, but not limited to those listed in Table 13 and elsewhere herein. In some embodiments, the genetically engineered bacteria comprise gene cassettes which modulate the ratios of tryptophan to one or more kynurenine downstream metabolites described herein, e.g., in FIG. 32.

[0164] In some embodiments, the genetically engineered bacteria comprise gene cassettes which modulate the ratios of kynurenine to one or more tryptophan metabolites, including, but not limited to those listed in Table 13, FIG. 34, FIG. 35A, FIG. 35B, and elsewhere herein, e.g., for the treatment, prevention and/or management of NASH. In some embodiments, the genetically engineered bacteria comprise gene cassettes which modulate the ratios of kynurenine to one or more downstream kynurenine metabolites, including, but not limited to those listed in Table 13, FIG. 34, FIG. 35A, FIG. 35B, and elsewhere herein. In some embodiments, the genetically engineered bacteria comprise gene cassettes which modulate the ratios between two downstream kynurenine metabolites, including, but not limited to those listed in Table 13, FIG. 34, FIG. 35A, FIG. 35B, and elsewhere herein. In some embodiments, the genetically engineered bacteria comprise gene cassettes which modulate the ratios between one or more tryptophan metabolites, including, but not limited to those listed in Table 13, FIG. 34, FIG. 35A, FIG. 35B, and elsewhere herein.

[0165] In certain embodiments, the genetically engineered bacteria comprise one or more gene cassettes as described herein, which increase typtophan levels in the patient, e.g., in the serum and/or in the gut, e.g., for the treatment, prevention and/or management of NASH. In certain embodiments, the genetically engineered bacteria comprise one or more gene cassettes as described herein, which increase kynurenine levels in the patient, e.g., in the serum and/or in the gut. In certain embodiments, the genetically engineered bacteria comprise one or more gene cassettes as described herein, which increase levels of downstream kynurenine metabolites described herein in the patient, e.g., in the serum and/or in the gut. In certain embodiments, the genetically engineered bacteria comprise one or more gene cassettes as described herein, which increase levels of downstream tryptophan metabolites described herein, including, but not limited to those listed in Table 13, FIG. 34, FIG. 35A, FIG. 35B, and elsewhere herein, in the patient, e.g., in the serum and/or in the gut.

[0166] In certain embodiments, the genetically engineered bacteria comprise one or more gene cassettes as described herein, which increase the TRP/KYN ratio in the patient, e.g., in the serum and/or in the gut, e.g., for the treatment, prevention and/or management of NASH. In some embodiments, the genetically engineered bacteria comprise gene cassettes which increase the ratios of tryptophan to one or more tryptophan metabolites, including, but not limited to those listed in Table 13, FIG. 34, FIG. 35A, FIG. 35B, and elsewhere herein. In some embodiments, the genetically engineered bacteria comprise gene cassettes which increase the ratios of tryptophan to one or more kynurenine downstream metabolites described herein, e.g., in FIG. 32. In some embodiments, the genetically engineered bacteria comprise gene cassettes which increase the ratios of kynurenine to one or more tryptophan metabolites, including, but not limited to those listed in Table 13, FIG. 34, FIG. 35A, FIG. 35B, and elsewhere herein. In some embodiments, the genetically engineered bacteria comprise gene cassettes which increase the ratios of kynurenine to one or more downstream kynurenine metabolites, including, but not limited to those listed in Table 13, FIG. 34, FIG. 35A, FIG. 35B, and elsewhere herein. In some embodiments, the genetically engineered bacteria comprise gene cassettes which increase the ratios between two downstream kynurenine metabolites, including, but not limited to those listed in Table 13, FIG. 34, FIG. 35A, FIG. 35B, and elsewhere herein. In some embodiments, the genetically engineered bacteria comprise gene cassettes which increase the ratios between one or more tryptophan metabolites, including, but not limited to those listed in Table 13, FIG. 34, FIG. 35A, FIG. 35B, and elsewhere herein., e.g., for the treatment, prevention and/or management of NASH

[0167] In certain embodiments, the genetically engineered bacteria comprise one or more gene cassettes as described herein, which decrease typtophan levels in the patient, e.g., in the serum and/or in the gut e.g., for the treatment, prevention and/or management of NASH. In certain embodiments, the genetically engineered bacteria comprise one or more gene cassettes as described herein, which decrease kynurenine levels in the patient, e.g., in the serum and/or in the gut. In certain embodiments, the genetically engineered bacteria comprise one or more gene cassettes as described herein, which decrease levels of downstream kynurenine metabolites described herein in the patient, e.g., in the serum and/or in the gut. In certain embodiments, the genetically engineered bacteria comprise one or more gene cassettes as described herein, which decrease levels of downstream tryptophan metabolites described herein, including, but not limited to those listed in Table 13, FIG. 34, FIG. 35A, FIG. 35B and elsewhere herein, in the patient, e.g., in the serum and/or in the gut, e.g., for the treatment, prevention and/or management of NASH.

[0168] In certain embodiments, the genetically engineered bacteria comprise one or more gene cassettes as described herein, which decrease the TRP/KYN ratio in the patient, e.g., in the serum and/or in the gut. In some embodiments, the genetically engineered bacteria comprise gene cassettes which decrease the ratios of tryptophan to one or more tryptophan metabolites, including, but not limited to those listed in Table 13, FIG. 34, FIG. 35A, FIG. 35B, and elsewhere herein. In some embodiments, the genetically engineered bacteria comprise gene cassettes which decrease the ratios of tryptophan to one or more kynurenine downstream metabolites described herein, e.g., in

[0169] FIG. 32. In some embodiments, the genetically engineered bacteria comprise gene cassettes which decrease the ratios of kynurenine to one or more tryptophan metabolites, including, but not limited to those listed in Table 13, FIG. 34, FIG. 35A, FIG. 35B, and elsewhere herein. In some embodiments, the genetically engineered bacteria comprise gene cassettes which decrease the ratios of kynurenine to one or more downstream kynurenine metabolites, including, but not limited to those listed in Table 13, FIG. 34, FIG. 35A, FIG. 35B, and elsewhere herein. In some embodiments, the genetically engineered bacteria comprise gene cassettes which decrease the ratios between two downstream kynurenine metabolites, including, but not limited to those listed in Table 13, FIG. 34, FIG. 35A, FIG. 35B, and elsewhere herein. In some embodiments, the genetically engineered bacteria comprise gene cassettes which decrease the ratios between one or more tryptophan metabolites, including, but not limited to those listed in Table 13, FIG. 34, FIG. 35A, FIG. 35B, and elsewhere herein, e.g., for the treatment, prevention and/or management of NASH.

[0170] In some embodiments, the genetically engineered bacteria comprise a gene cassette which modulates serotonin and or melatonin levels. In some embodiments, the genetically engineered bacteria comprise a gene cassette which increases serotonin and or melatonin levels, e.g., for the treatment, prevention and/or management of NASH. In some embodiments, the genetically engineered bacteria comprise a gene cassette which decreases serotonin and or melatonin levels. In some embodiments, the genetically engineered bacteria comprise a gene cassette which modulates the tryptophan to serotonin and or melatonin ratios. In some embodiments, the genetically engineered bacteria comprise a gene cassette which increases the tryptophan to serotonin and or melatonin ratios. In some embodiments, the genetically engineered bacteria comprise a gene cassette which decreases the tryptophan to serotonin and or melatonin ratios, e.g., for the prevention, management and/or treatment of NASH.

[0171] In certain embodiments, one or more of these circuits may be combined for the treatment of NASH and/or NAFLD. In a non-limiting example, SCFA (e.g., butyrate) producing, GLP-1 secreting, and tryptophan pathway modulating (e.g., tryptophan and/or indole metabolite and or/tryptamine producing) cassettes may be expressed in combination by the genetically engineered bacteria for the treatment of NASH and/or NAFLD.

### Diabetes

[0172] Diabetes mellitus type 1 (also known as type 1 diabetes) is a form of diabetes mellitus that results from the autoimmune destruction of the insulin-producing beta cells in the pancreas. The subsequent lack of insulin leads to increased glucose in blood and urine. The classical symptoms are frequent urination, increased thirst, increased hunger, and weight loss. In some embodiments the genetically engineered bacteria described herein are useful in the treatment, prevention and/or management of diabetes mellitus.

[0173] Diabetes mellitus type 2 is a long term metabolic disorder that is characterized by high blood sugar, insulin resistance, and relative lack of insulin. Common symptoms include increased thirst, frequent urination, and unexplained weight loss. Symptoms may also include increased hunger, feeling tired, and sores that do not heal. Often symptoms come on slowly. Long-term complications from high blood sugar include heart disease, strokes, diabetic retinopathy which can result in blindness, kidney failure, and poor blood flow in the limbs which may lead to amputations.

[0174] Insulin resistance (IR) is generally regarded as a pathological condition in which cells fail to respond to the normal actions of the hormone insulin. Normally insulin produced when glucose enters the circulation after a meal triggers glucose uptake into cells. Under conditions of insulin resistance, the cells in the body are resistant to the insulin produced after a meal, preventing glucose uptake and leading to high blood sugar.

[0175] The kynurenine hypothesis of diabetes is based on evidence of diabetogenic effects of the kynurenine metabolite Xanthurenic Acid (XA) and the realization that the KP is upregulated by low-grade inflammation and stress, two conditions involved in the pathogenesis of insulin resistance, and of diabetes type I and diabetes type II. Increased concentrations of KYNA and xanthurenic acid (3-Hydroxy KYNA, XA) were detected in the plasma of patients with type 2 diabetes, possibly due to chronic stress or the low-grade inflammation, which are risk factors for T2DM. As such, the production of kynurenine metabolites can function as a regulatory mechanism to attenuate damage by the inflammation-induced production of reactive oxygen species.

[0176] Experimental and clinical data have clearly established that besides fat, muscle and liver, pancreatic islet tissue itself is a site of inflammation during obesity and type 2 diabetes. It is therefore conceivable that in parallel to the high free fatty acids and glucose levels, pancreatic islet exposure to increased levels of cytokines may induce dysregulation of islet KP.

[0177] In some embodiments, the genetically engineered bacteria are useful for the prevention, treatment, and/or management of type 2 diabetes. In some embodiments, the genetically engineered bacteria comprise circuits which reduce inflammation. In some embodiments the circuits stimulate insulin secretion and/or promote satiety.

[0178] In some embodiments, the genetically engineered bacteria comprise one or more gene cassettes for the production of short-chain fatty acids, e.g., butyrate and/or propionate and/or acetate. In some embodiments, the genetically engineered bacteria comprise one or more gene cassettes for the production of GLP-1. In some embodiments, the genetically engineered bacteria comprise one or more gene cassettes for the production of short-chain fatty acids, e.g., butyrate and/or propionate for the treatment of type 2 diabetes. In some embodiments, the genetically engineered bacteria comprise one or more gene cassettes for the increase of bile salt catabolism, including but not limited to bile salt hydrolase or bile salt transporter producing cassettes.

[0179] In certain embodiments, the genetically engineered bacteria comprise one or more gene cassettes as described herein, which modulate typtophan levels in the patient, e.g., in the serum and/or in the gut. In certain embodiments, the genetically engineered bacteria comprise one or more gene cassettes as described herein, which modulate kynurenine levels in the patient, e.g., in the serum and/or in the gut, e.g., for the treatment, prevention and/or management of type 2 diabetes (T2DM). In certain embodiments, the genetically engineered bacteria comprise one or more gene cassettes as described herein, which modulate levels of downstream kynurenine metabolites described herein in the patient, e.g., in the serum and/or in the gut. In certain embodiments, the genetically engineered bacteria comprise one or more gene cassettes as described herein, which modulate levels of downstream tryptophan metabolites described herein, including, but not limited to those listed in Table 13, FIG. 34, FIG. 35A, FIG. 35B, and elsewhere herein, in the patient, e.g., in the serum and/or in the gut.

[0180] In certain embodiments, the genetically engineered bacteria comprise one or more gene cassettes as described herein, which modulate the TRP/KYN ratio in the patient, e.g., in the serum and/or in the gut, e.g., for the treatment, prevention and/or management of T2DM. In some embodiments, the genetically engineered bacteria comprise gene cassettes which modulate the ratios of tryptophan to one or more tryptophan metabolites, including, but not limited to those listed in Table 13, FIG. 34, FIG. 35A, FIG. 35B, and elsewhere herein. In some embodiments, the genetically engineered bacteria comprise gene cassettes which modulate the ratios of tryptophan to one or more kynurenine downstream metabolites described herein, e.g., in FIG. 32. In some embodiments, the genetically engineered bacteria comprise gene cassettes which modulate the ratios of kynurenine to one or more tryptophan metabolites, including, but not limited to those listed in Table 13, FIG. 34, FIG. 35A, FIG. 35B, and elsewhere herein. In some embodiments, the genetically engineered bacteria comprise gene cassettes which modulate the ratios of kynurenine to one or more downstream kynurenine metabolites, including, but not limited to those listed in Table 13, FIG. 34, FIG. 35A, FIG. 35B, and elsewhere herein. In some embodiments, the genetically engineered bacteria comprise gene cassettes which modulate the ratios between two downstream kynurenine metabolites, including, but not limited to those listed in Table 13, FIG. 34, FIG. 35A, FIG. 35B, and elsewhere herein. In some embodiments, the genetically engineered bacteria comprise gene cassettes which modulate the ratios between one or more tryptophan metabolites, including, but not limited to those listed in Table 13, FIG. 34, FIG. 35A, FIG. 35B, and elsewhere herein.

[0181] In certain embodiments, the genetically engineered bacteria comprise one or more gene cassettes as described herein, which increase typtophan levels in the patient, e.g., in the serum and/or in the gut, e.g., for the treatment, prevention and/or management of T2DM. In certain embodiments, the genetically engineered bacteria comprise one or more gene cassettes as described herein, which increase kynurenine levels in the patient, e.g., in the serum and/or in the gut. In certain embodiments, the genetically engineered bacteria comprise one or more gene cassettes as described herein, which increase levels of downstream kynurenine metabolites described herein in the patient, e.g., in the serum and/or in the gut. In certain embodiments, the genetically engineered bacteria comprise one or more gene cassettes as described herein, which increase levels of downstream tryptophan metabolites described herein, including, not limited to those listed in Table 13, FIG. 34, FIG. 35A, FIG. 35B, and elsewhere herein., in the patient, e.g., in the serum and/or in the gut.

[0182] In certain embodiments, the genetically engineered bacteria comprise one or more gene cassettes as described herein, which increase the TRP/KYN ratio in the patient, e.g., in the serum and/or in the gut, e.g., for the treatment, prevention and/or management of T2DM. In some embodiments, the genetically engineered bacteria comprise gene cassettes which increase the ratios of tryptophan to one or more tryptophan metabolites, including, but not limited to those listed in Table 13, FIG. 34, FIG. 35A, FIG. 35B, and elsewhere herein. In some embodiments, the genetically engineered bacteria comprise gene cassettes which increase the ratios of tryptophan to one or more kynurenine downstream metabolites described herein, e.g., in FIG. 32. In some embodiments, the genetically engineered bacteria comprise gene cassettes which increase the ratios of kynurenine to one or more tryptophan metabolites, including, but not limited to those listed in Table 13, FIG. 34, FIG. 35A, FIG. 35B, and elsewhere herein. In some embodiments, the genetically engineered bacteria comprise gene cassettes which increase the ratios of kynurenine to one or more downstream kynurenine metabolites, including, but not limited to those listed in Table 13, FIG. 34, FIG. 35A, FIG. 35B, and elsewhere herein. In some embodiments, the genetically engineered bacteria comprise gene cassettes which increase the ratios between two downstream kynurenine metabolites, including, but not limited to those listed in Table 13, FIG. 34, FIG. 35A, FIG. 35B, and elsewhere herein. In some embodiments, the genetically engineered bacteria comprise gene cassettes which increase the ratios between one or more tryptophan metabolites, including, but not limited to those listed in Table 13, FIG. 34, FIG. 35A, FIG. 35B, and elsewhere herein.

[0183] In certain embodiments, the genetically engineered bacteria comprise one or more gene cassettes as described herein, which decrease typtophan levels in the patient, e.g., in the serum and/or in the gut, e.g., for the treatment, prevention and/or management of T2DM. In certain embodiments, the genetically engineered bacteria comprise one or more gene cassettes as described herein, which decrease kynurenine levels in the patient, e.g., in the serum and/or in the gut. In certain embodiments, the genetically engineered bacteria comprise one or more gene cassettes as described herein, which decrease levels of downstream kynurenine metabolites described herein in the patient, e.g., in the serum and/or in the gut. In certain embodiments, the genetically engineered bacteria comprise one or more gene cassettes as described herein, which decrease levels of downstream tryptophan metabolites described herein, including, but not limited to those listed in Table 13, FIG. 34, FIG. 35A, FIG. 35B, and elsewhere herein, in the patient, e.g., in the serum and/or in the gut.

[0184] In certain embodiments, the genetically engineered bacteria comprise one or more gene cassettes as described herein, which decrease the TRP/KYN ratio in the patient, e.g., in the serum and/or in the gut, e.g., for the treatment, prevention and/or management of T2DM. In some embodiments, the genetically engineered bacteria comprise gene cassettes which decrease the ratios of tryptophan to one or more tryptophan metabolites, including, but not limited to those listed in Table 13, FIG. 34, FIG. 35A, FIG. 35B, and elsewhere herein. In some embodiments, the genetically engineered bacteria comprise gene cassettes which decrease the ratios of tryptophan to one or more kynurenine downstream metabolites described herein, e.g., in FIG. 32. In some embodiments, the genetically engineered bacteria comprise gene cassettes which decrease the ratios of kynurenine to one or more tryptophan metabolites, including, but not limited to those listed in Table 13, FIG. 34, FIG. 35A, FIG. 35B, and elsewhere herein. In some embodiments, the genetically engineered bacteria comprise gene cassettes which decrease the ratios of kynurenine to one or more downstream kynurenine metabolites, including, but not limited to those listed in Table 13, FIG. 34, FIG. 35A, FIG. 35B, and elsewhere herein. In some embodiments, the genetically engineered bacteria comprise gene cassettes which decrease the ratios between two downstream kynurenine metabolites, including, but not limited to those listed in Table 13, FIG. 34, FIG. 35A, FIG. 35B, and elsewhere herein. In some embodiments, the genetically engineered bacteria comprise gene cassettes which decrease the ratios between one or more tryptophan metabolites, including, but not limited to those listed in Table 13, FIG. 34, FIG. 35A, FIG. 35B, and elsewhere herein.

[0185] In some embodiments, the genetically engineered bacteria comprise a gene cassette which modulates serotonin and or melatonin levels. In some embodiments, the genetically engineered bacteria comprise a gene cassette which increases serotonin and or melatonin levels, e.g., for the treatment, prevention and/or management of T2DM. In some embodiments, the genetically engineered bacteria comprise a gene cassette which decreases serotonin and or melatonin levels. In some embodiments, the genetically engineered bacteria comprise a gene cassette which modulates the tryptophan to serotonin and or melatonin ratios. In some embodiments, the genetically engineered bacteria comprise a gene cassette which increases the tryptophan to serotonin and or melatonin ratios. In some embodiments, the genetically engineered bacteria comprise a gene cassette which decreases the tryptophan to serotonin and or melatonin ratios.

[0186] In one embodiment, the genetically engineered bacteria produce IL-22, e.g., for the treatment of diabetes and other metabolic disease described herein.

[0187] In certain embodiments, one or more of these circuits may be combined for the treatment of type 2 diabetes. In a non-limiting example, SCFA (e.g., butyrate) producing, GLP-1 secreting, and tryptophan pathway modulating (e.g., tryptophan and/or indole metabolite and or/tryptamine producing) cassettes may be expressed in combination by the genetically engineered bacteria for the treatment of type 2 diabetes.

### Obesity

[0188] Metabolic Syndrome affects approximately 20-30% of the middle-aged population, and represents an increased risk to cardiovascular disorders, the leading cause of death in the United States. Obesity, dyslipidemia, hypertension, and type 2 diabetes are described as metabolic syndrome. In some embodiments, the genetically engineered bacteria described herein are useful in the treatment, prevention and/or management of metabolic syndrome and /or obesity. Several of the metabolites and polypeptides produced by the genetically engineered bacteria are useful for increasing insulin secretion and promoting satiety, e.g. GLP-1.

[0189] Obesity is a common, deadly, and costly disease in developed countries which impacts all age groups, race, and gender. Obesity can be classified as an inflammatory disease because it is associated with immune activation and a chronic, low-grade systemic inflammation. Endotoxemia, a process resulting from translocation of endotoxic compounds (lipopolysaccharides [LPS]), of gram-negative intestinal bacteria. In the last decade, it has become evident that insulin resistance and T2DM are characterized by low-grade inflammation. In this respect, LPS trigger a low-grade inflammatory response, and the process of endotoxemia can therefore result in the development of insulin resistance and other metabolic disorders. Several of the metabolites produced by the genetically engineered bacteria described herein are useful in the reduction of inflammation. For example, butyrate, contributes to maintaining intestinal integrity. Other anti-inflammatory metabolites as described herein may also be useful in the treatment of type 2 diaberes.

[0190] Over nutrition leads to an excess intake of tryptophan (TRP)—an essential amino acid, a precursor for serotonin (5-HT) and melatonin, and a key player in the caloric intake regulation. Yet, the circulating levels of TRP have been shown to be low in morbidly obese subjects (Brandacher G, Winkler C, Aigner F, et al. Bariatric surgery cannot prevent tryptophan depletion due to chronic immune activation in morbidly obese patients. Obes Surg 2006; 16:541-548).

[0191] Serotonin regulates carbohydrate and fat intake (Blundell J E, Lawton C L. Serotonin and dietary fat intake: effects of dexfenfluramine. Metabolism 1995; 44:33-37) , relieves stress which is another caloric intake trigger (Buwalda B, Blom W A, Koolhaas J M, van Dijk G. Behavioral and physiological responses to stress are affected by high-fat feeding in male rats; Physiol Behav 2001; 73:371-377), and inhibits neuropeptide Y (NYP)—one of the most potent orexigenic peptides in the hypothalamus (Jia Y, El-Haddad M, Gendy A, Nguyen T, Ross M G.

[0192] In some embodiments, the genetically engineered bacteria are useful for the prevention, treatment, and/or management of obesity. In some embodiments, the genetically engineered bacteria comprise circuits which reduce inflammation. In some embodiments, the circuits stimulate insulin secretion and/or promote satiety.

[0193] In some embodiments, the genetically engineered bacteria comprise one or more gene cassettes for the production of short-chain fatty acids, e.g., butyrate and/or propionate and/or acetate. In some embodiments, the genetically engineered bacteria comprise one or more gene cassettes for the production of GLP-1 and/or GLP-1 analog(s). In some embodiments, the genetically engineered bacteria comprise one or more gene cassettes for the production of short-chain fatty acids, e.g., butyrate and/or propionate for the treatment of obesity. In some embodiments, the genetically engineered bacteria comprise one or more gene cassettes for the increase of bile salt catabolism, including, but not limited, to bile salt hydrolase or bile salt transporter producing cassettes.

[0194] In certain embodiments, the genetically engineered bacteria comprise one or more gene cassettes as described herein, which modulate typtophan levels in the patient, e.g., in the serum and/or in the gut, e.g., for the prevention, treatment, and/or management of obesity. In certain embodiments, the genetically engineered bacteria comprise one or more gene cassettes as described herein, which modulate kynurenine levels in the patient, e.g., in the serum and/or in the gut. In certain embodiments, the genetically engineered bacteria comprise one or more gene cassettes as described herein, which modulate levels of downstream kynurenine metabolites described herein in the patient, e.g., in the serum and/or in the gut. In certain embodiments, the genetically engineered bacteria comprise one or more gene cassettes as described herein, which modulate levels of downstream tryptophan metabolites described herein, including, but not limited to those listed in Table 13, FIG. 34, FIG. 35A, FIG. 35B, and elsewhere herein, in the patient, e.g., in the serum and/or in the gut.

[0195] In certain embodiments, the genetically engineered bacteria comprise one or more gene cassettes as described herein, which modulate the TRP/KYN ratio in the patient, e.g., in the serum and/or in the gut. In some embodiments, the genetically engineered bacteria comprise gene cassettes which modulate the ratios of tryptophan to one or more tryptophan metabolites, including, but not limited to those listed in Table 13, and elsewhere herein, including but not limited to, Tryptamine, Indole-3-acetaldehyde, Indole-3-acetic acid, indole-3- propionic acid, Indole, 6-formylindolo(3,2-b)carbazole, Kynurenic acid, Indole-3-aldehyde; 3,3′ -Diindo lylmethane. In some embodiments, the genetically engineered bacteria comprise gene cassettes which modulate the ratios of tryptophan to one or more kynurenine downstream metabolites described herein, e.g., in FIG. 32. In some embodiments, the genetically engineered bacteria comprise gene cassettes which modulate the ratios of kynurenine to one or more tryptophan metabolites, including, but not limited to those listed in Table 13, FIG. 34, FIG. 35A, FIG. 35B, and FIG. 32 and elsewhere herein, e.g., for the prevention, treatment, and/or management of obesity. In some embodiments, the genetically engineered bacteria comprise gene cassettes which modulate the ratios of kynurenine to one or more downstream kynurenine metabolites, including, but not limited to those listed in Table 13, FIG. 34, FIG. 35A, FIG. 35B, and FIG. 32 and elsewhere herein. In some embodiments, the genetically engineered bacteria comprise gene cassettes which modulate the ratios between two downstream kynurenine metabolites, including, but not limited to those listed in Table 13, FIG. 34, FIG. 35A, FIG. 35B, and FIG. 32 and elsewhere herein. In some embodiments, the genetically engineered bacteria comprise gene cassettes which modulate the ratios between one or more tryptophan metabolites, including, but not limited to those listed in Table 13, FIG. 34, FIG. 35A, FIG. 35B, and FIG. 32 and elsewhere herein.

[0196] In certain embodiments, the genetically engineered bacteria comprise one or more gene cassettes as described herein, which increase typtophan levels in the patient, e.g., in the serum and/or in the gut e.g., for the prevention, treatment, and/or management of obesity. In certain embodiments, the genetically engineered bacteria comprise one or more gene cassettes as described herein, which increase kynurenine levels in the patient, e.g., in the serum and/or in the gut. In certain embodiments, the genetically engineered bacteria comprise one or more gene cassettes as described herein, which increase levels of downstream kynurenine metabolites described herein in the patient, e.g., in the serum and/or in the gut. In certain embodiments, the genetically engineered bacteria comprise one or more gene cassettes as described herein, which increase levels of downstream tryptophan metabolites described herein, including, but not limited to those listed in Table 13, FIG. 34, FIG. 35A, FIG. 35B, and FIG. 32 and elsewhere herein, in the patient, e.g., in the serum and/or in the gut.

[0197] In certain embodiments, the genetically engineered bacteria comprise one or more gene cassettes as described herein, which increase the TRP/KYN ratio in the patient, e.g., in the serum and/or in the gut e.g., for the prevention, treatment, and/or management of obesity. In some embodiments, the genetically engineered bacteria comprise gene cassettes which increase the ratios of tryptophan to one or more tryptophan metabolites, including, but not limited to those listed in Table 13, FIG. 34, FIG. 35A, FIG. 35B, and FIG. 32 and elsewhere herein. In some embodiments, the genetically engineered bacteria comprise gene cassettes which increase the ratios of tryptophan to one or more kynurenine downstream metabolites described herein, e.g., in FIG. 32. In some embodiments, the genetically engineered bacteria comprise gene cassettes which increase the ratios of kynurenine to one or more tryptophan metabolites, including, but not limited to those listed in Table 13, FIG. 34, FIG. 35A, FIG. 35B, and FIG. 32 and elsewhere herein. In some embodiments, the genetically engineered bacteria comprise gene cassettes which increase the ratios of kynurenine to one or more downstream kynurenine metabolites, including, but not limited to those listed in Table 13, FIG. 34, FIG. 35A, FIG. 35B, and FIG. 32 and elsewhere herein. In some embodiments, the genetically engineered bacteria comprise gene cassettes which increase the ratios between two downstream kynurenine metabolites, including, but not limited to those listed in Table 13, FIG. 34, FIG. 35A, FIG. 35B, and FIG. 32 and elsewhere herein. In some embodiments, the genetically engineered bacteria comprise gene cassettes which increase the ratios between one or more tryptophan metabolites, including, but not limited to those listed in Table 13, FIG. 34, FIG. 35A, FIG. 35B, and elsewhere herein.

[0198] In certain embodiments, the genetically engineered bacteria comprise one or more gene cassettes as described herein, which decrease typtophan levels in the patient, e.g., in the serum and/or in the gut, e.g., for the prevention, treatment, and/or management of obesity. In certain embodiments, the genetically engineered bacteria comprise one or more gene cassettes as described herein, which decrease kynurenine levels in the patient, e.g., in the serum and/or in the gut. In certain embodiments, the genetically engineered bacteria comprise one or more gene cassettes as described herein, which decrease levels of downstream kynurenine metabolites described herein in the patient, e.g., in the serum and/or in the gut. In certain embodiments, the genetically engineered bacteria comprise one or more gene cassettes as described herein, which decrease levels of downstream tryptophan metabolites described herein, including, but not limited to those listed in Table 13, FIG. 34, FIG. 35A, FIG. 35B, and FIG. 32 and elsewhere herein, in the patient, e.g., in the serum and/or in the gut.

[0199] In certain embodiments, the genetically engineered bacteria comprise one or more gene cassettes as described herein, which decrease the TRP/KYN ratio in the patient, e.g., in the serum and/or in the gut. In some embodiments, the genetically engineered bacteria comprise gene cassettes which decrease the ratios of tryptophan to one or more tryptophan metabolites, including, but not limited to those listed in Table 13, FIG. 34, FIG. 35A, FIG. 35B, and FIG. 32 and elsewhere herein, e.g., for the prevention, treatment, and/or management of obesity. In some embodiments, the genetically engineered bacteria comprise gene cassettes which decrease the ratios of tryptophan to one or more kynurenine downstream metabolites described herein, e.g., in FIG. 32. In some embodiments, the genetically engineered bacteria comprise gene cassettes which decrease the ratios of kynurenine to one or more tryptophan metabolites, including, but not limited to those listed in Table 13, FIG. 34, FIG. 35A, FIG. 35B, and FIG. 32 and elsewhere herein. In some embodiments, the genetically engineered bacteria comprise gene cassettes which decrease the ratios of kynurenine to one or more downstream kynurenine metabolites, including, but not limited to those listed in Table 13, FIG. 34, FIG. 35A, FIG. 35B, and FIG. 32 and elsewhere herein. In some embodiments, the genetically engineered bacteria comprise gene cassettes which decrease the ratios between two downstream kynurenine metabolites, including, but not limited to those listed in Table 13, FIG. 34, FIG. 35A, FIG. 35B, and FIG. 32 and elsewhere herein. In some embodiments, the genetically engineered bacteria comprise gene cassettes which decrease the ratios between one or more tryptophan metabolites, including, but not limited to those listed in Table 13, FIG. 34, FIG. 35A, FIG. 35B, and FIG. 32 and elsewhere herein, e.g., for the prevention, treatment, and/or management of obesity.

[0200] In some embodiments, the genetically engineered bacteria comprise a gene cassette which modulates serotonin and or melatonin levels. In some embodiments, the genetically engineered bacteria comprise a gene cassette which increases serotonin and or melatonin levels. In some embodiments, the genetically engineered bacteria comprise a gene cassette which decreases serotonin and or melatonin levels. In some embodiments, the genetically engineered bacteria comprise a gene cassette which modulates the tryptophan to serotonin and or melatonin ratios. In some embodiments, the genetically engineered bacteria comprise a gene cassette which increases the tryptophan to serotonin and or melatonin ratios. In some embodiments, the genetically engineered bacteria comprise a gene cassette which decreases the tryptophan to serotonin and or melatonin ratios.

[0201] In certain embodiments, one or more of these circuits may be combined for the treatment of obesity. In a non-limiting example, SCFA (e.g., butyrate) producing, GLP-1 secreting, and tryptophan pathway modulating (e.g., tryptophan and/or indole metabolite and or/tryptamine producing) cassettes may be expressed in combination by the genetically engineered bacteria for the treatment of obesity. Further combinations may include cytokine producing circuits, such as IL-22.

### Prader Willi Syndrome

[0202] Prader-Willi syndrome (OMIM 176270) is a complex genetic neurodevelopmental disorder with manifested early in failure to thrive, feeding difficulties during infancy, hypogonadism/hypogenitalism, growth hormone deficiency, and typically a paternal 15q11-q13 chromosome deletion. In early childhood trough alduhood, food seeking behaviors and hyperphagia are noted along with a low metabolic rate and decreased physical activity leading to obesity which can be life-threatening, if not controlled. PWS is considered the most common syndromic cause of life threatening obesity in childhood (Buttler et al., Am J Med Genet A. 2015 March; 167A(3):563-71; Increased plasma chemokine levels in children with Prader-Willi syndrome). It has been reported that, when matched for body mass index (BMI), PWS adults had the same prevalence of metabolic syndrome (41.4%) and insulin resistance index as obese controls.

[0203] Prader-Willi syndrome (PWS) has no cure. PWS syndrome individuals present with obesity with hyperphagia and deficit of satiety, and in some cases insulin resistance, that persists thoughout youth and adulthood and remains a critical problem in PWS teenagers and adults because it leads to severe complications, such as limb edema, cardiac or respiratory failure, and physical disabilities. Severe obesity, and food seeking therfroe remains the larges problem with PWS. Access to food must be strictly supervised and limited. Therefore, agents which modulate satiety and orh insulin levels may be useful in the treatment of PWS.

[0204] In additiona, increased inflammatory markers and cytokine levels in the plasma have been observed in PWS individuals. These cytokines serve as chemoattractants for recruitment of immune cells and indicate an inflammatory component in PWS, which underlies certain aspects of the pathology (Buttler et al., Am J Med Genet A. 2015 March; 167A(3):563-71; Increased plasma chemokine levels in children with Prader-Willi syndrome). Therefore, anti-inflammatory agents may be useful in the treatment of certain aspects of PWS.

[0205] In some embodiments, the genetically engineered bacteria comprise circuits which reduce inflammation. In some embodiments the circuits stimulate insulin secretion and/or promote satiety.

[0206] In some embodiments, the genetically engineered bacteria are useful for the prevention, treatment, and/or management of PWS. In some embodiments, the genetically engineered bacteria comprise one or more gene cassettes for the production of short-chain fatty acids, e.g., butyrate and/or propionate and/or acetate. In some embodiments, the genetically engineered bacteria comprise one or more gene cassettes for the production of GLP-1. In some embodiments, the genetically engineered bacteria comprise one or more gene cassettes for the production of short-chain fatty acids, e.g., butyrate and/or propionate for the treatment of PWS. In some embodiments, the genetically engineered bacteria comprise one or more gene cassettes for the increase of bile salt catabolism, including but not limited to bile salt hydrolase or bile salt transporter producing cassettes.

[0207] In certain embodiments, the genetically engineered bacteria comprise one or more gene cassettes as described herein, which modulate typtophan levels in the patient, e.g., in the serum and/or in the gut. In certain embodiments, the genetically engineered bacteria comprise one or more gene cassettes as described herein, which modulate kynurenine levels in the patient, e.g., in the serum and/or in the gut, e.g., for the prevention, treatment, and/or management of PWS. In certain embodiments, the genetically engineered bacteria comprise one or more gene cassettes as described herein, which modulate levels of downstream kynurenine metabolites described herein in the patient, e.g., in the serum and/or in the gut. In certain embodiments, the genetically engineered bacteria comprise one or more gene cassettes as described herein, which modulate levels of downstream tryptophan metabolites described herein, including, but not limited to those listed in Table 13, FIG. 34, FIG. 35A, FIG. 35B, and FIG. 32 and elsewhere herein, in the patient, e.g., in the serum and/or in the gut.

[0208] In certain embodiments, the genetically engineered bacteria comprise one or more gene cassettes as described herein, which modulate the TRP/KYN ratio in the patient, e.g., in the serum and/or in the gut. In some embodiments, the genetically engineered bacteria comprise gene cassettes which modulate the ratios of tryptophan to one or more tryptophan metabolites, including, but not limited to those listed in Table 13, FIG. 34, FIG. 35A, FIG. 35B, and FIG. 32 and elsewhere herein, e.g., for the prevention, treatment, and/or management of PWS. In some embodiments, the genetically engineered bacteria comprise gene cassettes which modulate the ratios of tryptophan to one or more kynurenine downstream metabolites described herein, e.g., in FIG. 32. In some embodiments, the genetically engineered bacteria comprise gene cassettes which modulate the ratios of kynurenine to one or more tryptophan metabolites, including, but not limited to those listed in Table 13, FIG. 34, FIG. 35A, FIG. 35B, and FIG. 32 and elsewhere herein. In some embodiments, the genetically engineered bacteria comprise gene cassettes which modulate the ratios of kynurenine to one or more downstream kynurenine metabolites, including, but not limited to those listed in Table 13, FIG. 34, FIG. 35A, FIG. 35B, and FIG. 32 and elsewhere herein. In some embodiments, the genetically engineered bacteria comprise gene cassettes which modulate the ratios between two downstream kynurenine metabolites, including, but not limited to those listed in Table 13, FIG. 34, FIG. 35A, FIG. 35B, and FIG. 32 and elsewhere herein. In some embodiments, the genetically engineered bacteria comprise gene cassettes which modulate the ratios between one or more tryptophan metabolites, including, but not limited to those listed in Table 13, FIG. 34, FIG. 35A, FIG. 35B, and FIG. 32 and elsewhere herein, e.g., for the prevention, treatment, and/or management of PWS.

[0209] In certain embodiments, the genetically engineered bacteria comprise one or more gene cassettes as described herein, which increase typtophan levels in the patient, e.g., in the serum and/or in the gut. In certain embodiments, the genetically engineered bacteria comprise one or more gene cassettes as described herein, which increase kynurenine levels in the patient, e.g., in the serum and/or in the gut. In certain embodiments, the genetically engineered bacteria comprise one or more gene cassettes as described herein, which increase levels of downstream kynurenine metabolites described herein in the patient, e.g., in the serum and/or in the gut. In certain embodiments, the genetically engineered bacteria comprise one or more gene cassettes as described herein, which increase levels of downstream tryptophan metabolites described herein, including, but not limited to those listed in Table 13, FIG. 34, FIG. 35A, FIG. 35B, and FIG. 32 and elsewhere herein, in the patient, e.g., in the serum and/or in the gut, e.g., for the prevention, treatment, and/or management of PWS.

[0210] In certain embodiments, the genetically engineered bacteria comprise one or more gene cassettes as described herein, which increase the TRP/KYN ratio in the patient, e.g., in the serum and/or in the gut. In some embodiments, the genetically engineered bacteria comprise gene cassettes which increase the ratios of tryptophan to one or more tryptophan metabolites, including, but not limited to those listed in Table 13, FIG. 34, FIG. 35A, FIG. 35B, and FIG. 32 and elsewhere herein. In some embodiments, the genetically engineered bacteria comprise gene cassettes which increase the ratios of tryptophan to one or more kynurenine downstream metabolites described herein, e.g., in FIG. 32. In some embodiments, the genetically engineered bacteria comprise gene cassettes which increase the ratios of kynurenine to one or more tryptophan metabolites, including, but not limited to those listed in Table 13, FIG. 34, FIG. 35A, FIG. 35B, and FIG. 32 and elsewhere herein. In some embodiments, the genetically engineered bacteria comprise gene cassettes which increase the ratios of kynurenine to one or more downstream kynurenine metabolites, including, but not limited to those listed in Table 13, FIG. 34, FIG. 35A, FIG. 35B, and FIG. 32 and elsewhere herein. In some embodiments, the genetically engineered bacteria comprise gene cassettes which increase the ratios between two downstream kynurenine metabolites, including, but not limited to those listed in Table 13, FIG. 34, FIG. 35A, FIG. 35B, and FIG. 32 and elsewhere herein. In some embodiments, the genetically engineered bacteria comprise gene cassettes which increase the ratios between one or more tryptophan metabolites, including, but not limited to those listed in Table 13, FIG. 34, FIG. 35A, FIG. 35B, and FIG. 32 and elsewhere herein, e.g., for the prevention, treatment, and/or management of PWS.

[0211] In certain embodiments, the genetically engineered bacteria comprise one or more gene cassettes as described herein, which decrease typtophan levels in the patient, e.g., in the serum and/or in the gut. In certain embodiments, the genetically engineered bacteria comprise one or more gene cassettes as described herein, which decrease kynurenine levels in the patient, e.g., in the serum and/or in the gut. In certain embodiments, the genetically engineered bacteria comprise one or more gene cassettes as described herein, which decrease levels of downstream kynurenine metabolites described herein in the patient, e.g., in the serum and/or in the gut. In certain embodiments, the genetically engineered bacteria comprise one or more gene cassettes as described herein, which decrease levels of downstream tryptophan metabolites described herein, including, but not limited to those listed in Table 13, FIG. 34, FIG. 35A, FIG. 35B, and FIG. 32 and elsewhere herein, in the patient, e.g., in the serum and/or in the gut, e.g., for the prevention, treatment, and/or management of PWS.

[0212] In certain embodiments, the genetically engineered bacteria comprise one or more gene cassettes as described herein, which decrease the TRP/KYN ratio in the patient, e.g., in the serum and/or in the gut. In some embodiments, the genetically engineered bacteria comprise gene cassettes which decrease the ratios of tryptophan to one or more tryptophan metabolites, including, but not limited to those listed in Table 13, FIG. 34, FIG. 35A, FIG. 35B, and FIG. 32 and elsewhere herein. In some embodiments, the genetically engineered bacteria comprise gene cassettes which decrease the ratios of tryptophan to one or more kynurenine downstream metabolites described herein, e.g., in FIG. 32. In some embodiments, the genetically engineered bacteria comprise gene cassettes which decrease the ratios of kynurenine to one or more tryptophan metabolites, including, but not limited to those listed in Table 13, FIG. 34, FIG. 35A, FIG. 35B, and FIG. 32 and elsewhere herein. In some embodiments, the genetically engineered bacteria comprise gene cassettes which decrease the ratios of kynurenine to one or more downstream kynurenine metabolites, including, but not limited to those listed in Table 13, FIG. 34, FIG. 35A, FIG. 35B, and FIG. 32 and elsewhere herein. In some embodiments, the genetically engineered bacteria comprise gene cassettes which decrease the ratios between two downstream kynurenine metabolites, including, but not limited to those listed in Table 13, FIG. 34, FIG. 35A, FIG. 35B, and FIG. 32 and elsewhere herein. In some embodiments, the genetically engineered bacteria comprise gene cassettes which decrease the ratios between one or more tryptophan metabolites, including, but not limited to those listed in Table 13, FIG. 34, FIG. 35A, FIG. 35B, and FIG. 32 and elsewhere herein, e.g., for the prevention, treatment, and/or management of PWS.

[0213] In some embodiments, the genetically engineered bacteria comprise a gene cassette which modulates serotonin and or melatonin levels. In some embodiments, the genetically engineered bacteria comprise a gene cassette which increases serotonin and or melatonin levels, e.g., for the prevention, treatment, and/or management of PWS. In some embodiments, the genetically engineered bacteria comprise a gene cassette which decreases serotonin and or melatonin levels. In some embodiments, the genetically engineered bacteria comprise a gene cassette which modulates the tryptophan to serotonin and or melatonin ratios. In some embodiments, the genetically engineered bacteria comprise a gene cassette which increases the tryptophan to serotonin and or melatonin ratios. In some embodiments, the genetically engineered bacteria comprise a gene cassette which decreases the tryptophan to serotonin and or melatonin ratios.

[0214] In certain embodiments, one or more of these circuits may be combined for the treatment of PWS. In a non-limiting example, SCFA (e.g., butyrate) producing, GLP-1 secreting, and tryptophan pathway modulating (e.g., tryptophan and/or indole metabolite and or/tryptamine producing) cassettes may be expressed in combination by the genetically engineered bacteria for the treatment of PWS.

### Metabolic Syndrome

[0215] Metabolic syndrome is a clustering of at least three of five of the following medical conditions: abdominal (central) obesity, elevated blood pressure, elevated fasting plasma glucose, high serum triglycerides, and low high-density lipoprotein (HDL) levels.

[0216] In some embodiments, the genetically engineered bacteria are useful for the prevention, treatment, and/or management of metabolic syndrome. In some embodiments, the genetically engineered bacteria comprise circuits which reduce inflammation. In some embodiments, the circuits stimulate insulin secretion and/or promote satiety.

[0217] In some embodiments, the genetically engineered bacteria comprise one or more gene cassettes for the production of short-chain fatty acids, e.g., butyrate and/or propionate, and/or acetate. In some embodiments, the genetically engineered bacteria comprise one or more gene cassettes for the production of GLP-1. In some embodiments, the genetically engineered bacteria comprise one or more gene cassettes for the production of short-chain fatty acids, e.g., butyrate and/or propionate for the treatment of metabolic syndrome. In some embodiments, the genetically engineered bacteria comprise one or more gene cassettes for the increase of bile salt catabolism, including but not limited to bile salt hydrolase or bile salt transporter producing cassettes.

[0218] In certain embodiments, the genetically engineered bacteria comprise one or more gene cassettes as described herein, which modulate typtophan levels in the patient, e.g., in the serum and/or in the gut, e.g., for the prevention, treatment, and/or management of metabolic syndrome. In certain embodiments, the genetically engineered bacteria comprise one or more gene cassettes as described herein, which modulate kynurenine levels in the patient, e.g., in the serum and/or in the gut. In certain embodiments, the genetically engineered bacteria comprise one or more gene cassettes as described herein, which modulate levels of downstream kynurenine metabolites described herein in the patient, e.g., in the serum and/or in the gut. In certain embodiments, the genetically engineered bacteria comprise one or more gene cassettes as described herein, which modulate levels of downstream tryptophan metabolites described herein, including, but not limited to those listed in Table 13, FIG. 34, FIG. 35A, FIG. 35B, and FIG. 32 and elsewhere herein, in the patient, e.g., in the serum and/or in the gut.

[0219] In certain embodiments, the genetically engineered bacteria comprise one or more gene cassettes as described herein, which modulate the TRP/KYN ratio in the patient, e.g., in the serum and/or in the gut, e.g., for the prevention, management and/or treatment of metabolic syndrome. In some embodiments, the genetically engineered bacteria comprise gene cassettes which modulate the ratios of tryptophan to one or more tryptophan metabolites, including, but not limited to those listed in Table 13, FIG. 34, FIG. 35A, FIG. 35B, and FIG. 32 and elsewhere herein. In some embodiments, the genetically engineered bacteria comprise gene cassettes which modulate the ratios of tryptophan to one or more kynurenine downstream metabolites described herein, e.g., in FIG. 32. In some embodiments, the genetically engineered bacteria comprise gene cassettes which modulate the ratios of kynurenine to one or more tryptophan metabolites, including, but not limited to those listed in Table 13, FIG. 34, FIG. 35A, FIG. 35B, and FIG. 32 and elsewhere herein. In some embodiments, the genetically engineered bacteria comprise gene cassettes which modulate the ratios of kynurenine to one or more downstream kynurenine metabolites, including, but not limited to those listed in Table 13, FIG. 34, FIG. 35A, FIG. 35B, and FIG. 32 and elsewhere herein. In some embodiments, the genetically engineered bacteria comprise gene cassettes which modulate the ratios between two downstream kynurenine metabolites, including, but not limited to those listed in Table 13, FIG. 34, FIG. 35A, FIG. 35B, and FIG. 32 and elsewhere herein. In some embodiments, the genetically engineered bacteria comprise gene cassettes which modulate the ratios between one or more tryptophan metabolites, including, but not limited to those listed in Table 13, FIG. 34, FIG. 35A, FIG. 35B, and FIG. 32 and elsewhere herein.

[0220] In certain embodiments, the genetically engineered bacteria comprise one or more gene cassettes as described herein, which increase typtophan levels in the patient, e.g., in the serum and/or in the gut. In certain embodiments, the genetically engineered bacteria comprise one or more gene cassettes as described herein, which increase kynurenine levels in the patient, e.g., in the serum and/or in the gut. In certain embodiments, the genetically engineered bacteria comprise one or more gene cassettes as described herein, which increase levels of downstream kynurenine metabolites described herein in the patient, e.g., in the serum and/or in the gut. In certain embodiments, the genetically engineered bacteria comprise one or more gene cassettes as described herein, which increase levels of downstream tryptophan metabolites described herein, including, but not limited to those listed in Table 13, FIG. 34, FIG. 35A, FIG. 35B, and FIG. 32 and elsewhere herein, in the patient, e.g., in the serum and/or in the gut, e.g., for the prevention, management and/or treatment of metabolic syndrome.

[0221] In certain embodiments, the genetically engineered bacteria comprise one or more gene cassettes as described herein, which increase the TRP/KYN ratio in the patient, e.g., in the serum and/or in the gut, e.g., for the prevention, management and/or treatment of metabolic syndrome. In some embodiments, the genetically engineered bacteria comprise gene cassettes which increase the ratios of tryptophan to one or more tryptophan metabolites, including, but not limited to those listed in Table 13, FIG. 34, FIG. 35A, FIG. 35B, and FIG. 32 and elsewhere herein. In some embodiments, the genetically engineered bacteria comprise gene cassettes which increase the ratios of tryptophan to one or more kynurenine downstream metabolites described herein, e.g., in FIG. 32. In some embodiments, the genetically engineered bacteria comprise gene cassettes which increase the ratios of kynurenine to one or more tryptophan metabolites, including, but not limited to those listed in Table 13, FIG. 34, FIG. 35A, FIG. 35B, and FIG. 32 and elsewhere herein. In some embodiments, the genetically engineered bacteria comprise gene cassettes which increase the ratios of kynurenine to one or more downstream kynurenine metabolites, including, but not limited to those listed in Table 13, FIG. 34, FIG. 35A, FIG. 35B, and FIG. 32 and elsewhere herein. In some embodiments, the genetically engineered bacteria comprise gene cassettes which increase the ratios between two downstream kynurenine metabolites, including, but not limited to those listed in Table 13, FIG. 34, FIG. 35A, FIG. 35B, and FIG. 32 and elsewhere herein. In some embodiments, the genetically engineered bacteria comprise gene cassettes which increase the ratios between one or more tryptophan metabolites, including, but not limited to those listed in Table 13, FIG. 34, FIG. 35A, FIG. 35B, and FIG. 32 and elsewhere herein, e.g., for the prevention, management and/or treatment of metabolic syndrome.

[0222] In certain embodiments, the genetically engineered bacteria comprise one or more gene cassettes as described herein, which decrease typtophan levels in the patient, e.g., in the serum and/or in the gut. In certain embodiments, the genetically engineered bacteria comprise one or more gene cassettes as described herein, which decrease kynurenine levels in the patient, e.g., in the serum and/or in the gut. In certain embodiments, the genetically engineered bacteria comprise one or more gene cassettes as described herein, which decrease levels of downstream kynurenine metabolites described herein in the patient, e.g., in the serum and/or in the gut. In certain embodiments, the genetically engineered bacteria comprise one or more gene cassettes as described herein, which decrease levels of downstream tryptophan metabolites described herein, including, but not limited to those listed in Table 13, FIG. 34, FIG. 35A, FIG. 35B, and FIG. 32 and elsewhere herein, in the patient, e.g., in the serum and/or in the gut.

[0223] In certain embodiments, the genetically engineered bacteria comprise one or more gene cassettes as described herein, which decrease the TRP/KYN ratio in the patient, e.g., in the serum and/or in the gut, e.g., for the prevention, management and/or treatment of metabolic syndrome. In some embodiments, the genetically engineered bacteria comprise gene cassettes which decrease the ratios of tryptophan to one or more tryptophan metabolites, including, but not limited to those listed in Table 13, FIG. 34, FIG. 35A, FIG. 35B, and FIG. 32 and elsewhere herein. In some embodiments, the genetically engineered bacteria comprise gene cassettes which decrease the ratios of tryptophan to one or more kynurenine downstream metabolites described herein, e.g., in FIG. 32. In some embodiments, the genetically engineered bacteria comprise gene cassettes which decrease the ratios of kynurenine to one or more tryptophan metabolites, including, but not limited to those listed in Table 13, FIG. 34, FIG. 35A, FIG. 35B, and FIG. 32 and elsewhere herein. In some embodiments, the genetically engineered bacteria comprise gene cassettes which decrease the ratios of kynurenine to one or more downstream kynurenine metabolites, including, but not limited to those listed in Table 13, FIG. 34, FIG. 35A, FIG. 35B, and FIG. 32 and elsewhere herein. In some embodiments, the genetically engineered bacteria comprise gene cassettes which decrease the ratios between two downstream kynurenine metabolites, including, but not limited to those listed in Table 13, FIG. 34, FIG. 35A, FIG. 35B, and FIG. 32 and elsewhere herein, e.g., for the prevention, management and/or treatment of metabolic syndrome. In some embodiments, the genetically engineered bacteria comprise gene cassettes which decrease the ratios between one or more tryptophan metabolites, including, but not limited to those listed in Table 13, FIG. 34, FIG. 35A, FIG. 35B, and FIG. 32 and elsewhere herein. In some embodiments, the genetically engineered bacteria comprise a gene cassette which modulates serotonin and or melatonin levels. In some embodiments, the genetically engineered bacteria comprise a gene cassette which increases serotonin and or melatonin levels. In some embodiments, the genetically engineered bacteria comprise a gene cassette which decreases serotonin and or melatonin levels. In some embodiments, the genetically engineered bacteria comprise a gene cassette which modulates the tryptophan to serotonin and or melatonin ratios. In some embodiments, the genetically engineered bacteria comprise a gene cassette which increases the tryptophan to serotonin and or melatonin ratios. In some embodiments, the genetically engineered bacteria comprise a gene cassette which decreases the tryptophan to serotonin and or melatonin ratios.

[0224] In certain embodiments, one or more of these circuits may be combined for the treatment of metabolic syndrome. In a non-limiting example, SCFA (e.g., butyrate) producing, GLP-1 secreting, and tryptophan pathway modulating (e.g., tryptophan and/or indole metabolite and or/tryptamine producing) cassettes may be expressed in combination by the genetically engineered bacteria for the treatment of metabolic syndrome.

### Cardiovascular Disease

[0225] Metabolic syndrome is an important risk factor for cardiovascular disease incidence and mortality, as well as all-cause mortality.

[0226] Cardiovascular disease includes coronary artery diseases (CAD) such as angina and myocardial infarction, stroke, hypertensive heart disease, rheumatic heart disease, cardiomyopathy, heart arrhythmia, congenital heart disease, valvular heart disease, carditis, aortic aneurysms, peripheral artery disease, and venous thrombosis. Coronary artery disease, stroke, and peripheral artery disease involve atherosclerosis, caused inter alia by high blood pressure, smoking, diabetes, lack of exercise, obesity, high blood cholesterol, poor diet, and excessive alcohol consumption, and the like.

[0227] The detection, prevention, and treatment of the underlying risk factors of the metabolic syndrome are a critical approach to lower the cardiovascular disease incidence in the general population.

[0228] Cellular adhesion molecules and oxidative stress play a role in the pathogenesis of atherosclerosis in patients with chronic kidney disease (CKD) and uremia. Uremia is condition that occurs when the kidneys no longer filter properly, and is likely to occur s in the final stage of chronic kidney disease. Several studies in CKD patients have shown that tryptophan metabolites along the kynurenine pathway are increased, possibly as consequence of inflammation. Therefore, anti-inflammatory agents may be useful in the treatment of cardiovascular disease, including CKD and artherosclerosis. In some embodiments, the genetically engineered bacteria modulate the levels of one or more of tryptophan, kynurenine, kynurenine downstream metabolites, and other tryptophan metabolites and /or modulate one or more metabolite ratios.

[0229] Ischemic stroke, which results from cerebral arterial occlusion, is becoming a major cause of morbidity and mortality in today's society and affects millions of people every year. Currently, the only approved treatment for the acute phase of stroke is the recombinant thrombolytic tissue-type plasminogen activator. Identifying molecules that contribute to the ischemic damage may help to elucidate potential therapeutic targets. In some embodiments the genetically engineered bacteria described herein are useful in the treatment, prevention and/or management of ischemia and stroke. Inflammation and oxidative stress are also involved in brain damage following stroke, and tryptophan oxidation along the kynurenine pathway contributes to the modulation of oxidative stress.

[0230] In some embodiments, the genetically engineered bacteria are useful for the prevention, treatment, and/or management of cardiovascular disease, including but not limited to, one or more of coronary artery diseases, hypertensive heart disease, rheumatic heart disease, cardiomyopathy, heart arrhythmia, congenital heart disease, valvular heart disease, carditis, aortic aneurysms, peripheral artery disease, venous thrombosis, ischemic stroke, and/or chronic kidney disease. In some embodiments, the genetically engineered bacteria comprise circuits which reduce inflammation. In some embodiments, the circuits stimulate insulin secretion and/or promote satiety.

[0231] In some embodiments, the genetically engineered bacteria comprise one or more gene cassettes for the production of short-chain fatty acids, e.g., butyrate and/or propionate and/or acetate. In some embodiments, the genetically engineered bacteria comprise one or more gene cassettes for the production of GLP-1. In some embodiments, the genetically engineered bacteria comprise one or more gene cassettes for the production of short-chain fatty acids, e.g., butyrate and/or propionate for the treatment of cardiovascular disease, including but not limited to, one or more of coronary artery diseases, hypertensive heart disease, rheumatic heart disease, cardiomyopathy, heart arrhythmia, congenital heart disease, valvular heart disease, carditis, aortic aneurysms, peripheral artery disease, venous thrombosis,.ischemic stroke, and/or chronic kidney disease.

[0232] In some embodiments, the genetically engineered bacteria comprise one or more gene cassettes for the increase of bile salt catabolism, including but not limited to bile salt hydrolase or bile salt transporter producing cassettes.

[0233] In certain embodiments, the genetically engineered bacteria comprise one or more gene cassettes as described herein, which modulate typtophan levels in the patient, e.g., in the serum and/or in the gut. In certain embodiments, the genetically engineered bacteria comprise one or more gene cassettes as described herein, which modulate kynurenine levels in the patient, e.g., in the serum and/or in the gut. In certain embodiments, the genetically engineered bacteria comprise one or more gene cassettes as described herein, which modulate levels of downstream kynurenine metabolites described herein in the patient, e.g., in the serum and/or in the gut. In certain embodiments, the genetically engineered bacteria comprise one or more gene cassettes as described herein, which modulate levels of downstream tryptophan metabolites described herein, including, but not limited to those listed in Table 13, FIG. 34, FIG. 35A, FIG. 35B, and FIG. 32 and elsewhere herein, in the patient, e.g., in the serum and/or in the gut.

[0234] In certain embodiments, the genetically engineered bacteria comprise one or more gene cassettes as described herein, which modulate the TRP/KYN ratio in the patient, e.g., in the serum and/or in the gut. In some embodiments, the genetically engineered bacteria comprise gene cassettes which modulate the ratios of tryptophan to one or more tryptophan metabolites, including, but not limited to those listed in Table 13, FIG. 34, FIG. 35A, FIG. 35B, and FIG. 32 and elsewhere herein. In some embodiments, the genetically engineered bacteria comprise gene cassettes which modulate the ratios of tryptophan to one or more kynurenine downstream metabolites described herein, e.g., in FIG. 32. In some embodiments, the genetically engineered bacteria comprise gene cassettes which modulate the ratios of kynurenine to one or more tryptophan metabolites, including, but not limited to those listed in Table 13, FIG. 34, FIG. 35A, FIG. 35B, and FIG. 32 and elsewhere herein. In some embodiments, the genetically engineered bacteria comprise gene cassettes which modulate the ratios of kynurenine to one or more downstream kynurenine metabolites, including, but not limited to those listed in Table 13, FIG. 34, FIG. 35A, FIG. 35B, and FIG. 32 and elsewhere herein. In some embodiments, the genetically engineered bacteria comprise gene cassettes which modulate the ratios between two downstream kynurenine metabolites, including, but not limited to those listed in Table 13, FIG. 34, FIG. 35A, FIG. 35B, and FIG. 32 and elsewhere herein. In some embodiments, the genetically engineered bacteria comprise gene cassettes which modulate the ratios between one or more tryptophan metabolites, including, but not limited to those listed in Table 13, FIG. 34, FIG. 35A, FIG. 35B, and FIG. 32 and elsewhere herein.

[0235] In certain embodiments, the genetically engineered bacteria comprise one or more gene cassettes as described herein, which increase typtophan levels in the patient, e.g., in the serum and/or in the gut. In certain embodiments, the genetically engineered bacteria comprise one or more gene cassettes as described herein, which increase kynurenine levels in the patient, e.g., in the serum and/or in the gut. In certain embodiments, the genetically engineered bacteria comprise one or more gene cassettes as described herein, which increase levels of downstream kynurenine metabolites described herein in the patient, e.g., in the serum and/or in the gut. In certain embodiments, the genetically engineered bacteria comprise one or more gene cassettes as described herein, which increase levels of downstream tryptophan metabolites described herein, including, but not limited to those listed in Table 13, FIG. 34, FIG. 35A, FIG. 35B, and FIG. 32 and elsewhere herein, in the patient, e.g., in the serum and/or in the gut.

[0236] In certain embodiments, the genetically engineered bacteria comprise one or more gene cassettes as described herein, which increase the TRP/KYN ratio in the patient, e.g., in the serum and/or in the gut. In some embodiments, the genetically engineered bacteria comprise gene cassettes which increase the ratios of tryptophan to one or more tryptophan metabolites, including, but not limited to those listed in Table 13, FIG. 34, FIG. 35A, FIG. 35B, and FIG. 32 and elsewhere herein. In some embodiments, the genetically engineered bacteria comprise gene cassettes which increase the ratios of tryptophan to one or more kynurenine downstream metabolites described herein, e.g., in FIG. 32. In some embodiments, the genetically engineered bacteria comprise gene cassettes which increase the ratios of kynurenine to one or more tryptophan metabolites, including, but not limited to those listed in Table 13, FIG. 34, FIG. 35A, FIG. 35B, and FIG. 32 and elsewhere herein. In some embodiments, the genetically engineered bacteria comprise gene cassettes which increase the ratios of kynurenine to one or more downstream kynurenine metabolites, including, but not limited to those listed in Table 13, FIG. 34, FIG. 35A, FIG. 35B, and FIG. 32 and elsewhere herein. In some embodiments, the genetically engineered bacteria comprise gene cassettes which increase the ratios between two downstream kynurenine metabolites, including, but not limited to those listed in Table 13, FIG. 34, FIG. 35A, FIG. 35B, and FIG. 32 and elsewhere herein. In some embodiments, the genetically engineered bacteria comprise gene cassettes which increase the ratios between one or more tryptophan metabolites, including, but not limited to those listed in Table 13, FIG. 34, FIG. 35A, FIG. 35B, and FIG. 32 and elsewhere herein, e.g., for the prevention, management and/or treatment of cardiovascular disease.

[0237] In certain embodiments, the genetically engineered bacteria comprise one or more gene cassettes as described herein, which decrease typtophan levels in the patient, e.g., in the serum and/or in the gut. In certain embodiments, the genetically engineered bacteria comprise one or more gene cassettes as described herein, which decrease kynurenine levels in the patient, e.g., in the serum and/or in the gut. In certain embodiments, the genetically engineered bacteria comprise one or more gene cassettes as described herein, which decrease levels of downstream kynurenine metabolites described herein in the patient, e.g., in the serum and/or in the gut. In certain embodiments, the genetically engineered bacteria comprise one or more gene cassettes as described herein, which decrease levels of downstream tryptophan metabolites described herein, including, but not limited to those listed in Table 13, FIG. 34, FIG. 35A, FIG. 35B, and FIG. 32 and elsewhere herein, in the patient, e.g., in the serum and/or in the gut, e.g., for the prevention, management and/or treatment of cardiovascular disease.

[0238] In certain embodiments, the genetically engineered bacteria comprise one or more gene cassettes as described herein, which decrease the TRP/KYN ratio in the patient, e.g., in the serum and/or in the gut. In some embodiments, the genetically engineered bacteria comprise gene cassettes which decrease the ratios of tryptophan to one or more tryptophan metabolites, including, but not limited to those listed in Table 13, FIG. 34, FIG. 35A, FIG. 35B, and FIG. 32 and elsewhere herein. In some embodiments, the genetically engineered bacteria comprise gene cassettes which decrease the ratios of tryptophan to one or more kynurenine downstream metabolites described herein, e.g., in FIG. 32. In some embodiments, the genetically engineered bacteria comprise gene cassettes which decrease the ratios of kynurenine to one or more tryptophan metabolites, including, but not limited to those listed in Table 13, FIG. 34, FIG. 35A, FIG. 35B, and FIG. 32 and elsewhere herein, e.g., for the prevention, management and/or treatment of cardiovascular disease. In some embodiments, the genetically engineered bacteria comprise gene cassettes which decrease the ratios of kynurenine to one or more downstream kynurenine metabolites, including, but not limited to those listed in Table 13, FIG. 34, FIG. 35A, FIG. 35B, and FIG. 32 and elsewhere herein. In some embodiments, the genetically engineered bacteria comprise gene cassettes which decrease the ratios between two downstream kynurenine metabolites, including, but not limited to those listed in Table 13, FIG. 34, FIG. 35A, FIG. 35B, and FIG. 32 and elsewhere herein. In some embodiments, the genetically engineered bacteria comprise gene cassettes which decrease the ratios between one or more tryptophan metabolites, including, but not limited to those listed in Table 13, FIG. 34, FIG. 35A, FIG. 35B, and FIG. 32 and elsewhere herein, e.g., for the prevention, management and/or treatment of cardiovascular disease.

[0239] In some embodiments, the genetically engineered bacteria comprise a gene cassette which modulates serotonin and or melatonin levels. In some embodiments, the genetically engineered bacteria comprise a gene cassette which increases serotonin and or melatonin levels. In some embodiments, the genetically engineered bacteria comprise a gene cassette which decreases serotonin and or melatonin levels. In some embodiments, the genetically engineered bacteria comprise a gene cassette which modulates the tryptophan to serotonin and or melatonin ratios. In some embodiments, the genetically engineered bacteria comprise a gene cassette which increases the tryptophan to serotonin and or melatonin ratios. In some embodiments, the genetically engineered bacteria comprise a gene cassette which decreases the tryptophan to serotonin and or melatonin ratios.

[0240] In certain embodiments, one or more of these circuits may be combined for the treatment of cardionvascular disorders. In a non-limiting example, SCFA (e.g., butyrate) producing, GLP-1 secreting, and tryptophan pathway modulating (e.g., tryptophan and/or indole metabolite and or/tryptamine producing) cassettes may be expressed in combination by the genetically engineered bacteria for the treatment of cardionvascular disorders.

[0241] Metabolic and Satiety Effector Molecules, and Modulators of Inflammation

[0242] The genetically engineered bacteria comprise a gene encoding a non-native metabolic and/or satiety effector and/or immune modulator molecule, and/or a gene cassette encoding a biosynthetic pathway capable of producing a metabolic and/or satiety effector and/or immune modulator molecule. In some embodiments, the metabolic and/or satiety effector molecule is selected from the group consisting of n-acyl-phophatidylethanolamines (NAPEs), n-acyl-ethanolamines (NAEs), ghrelin receptor antagonists, peptide YY3-36, cholecystokinin (CCK) family molecules, CCK58, CCK33, CCK22, CCK8, bombesin family molecules, bombesin, gastrin releasing peptide (GRP), neuromedin B (P), glucagon, GLP-1, GLP-2, apolipoprotein A-IV, amylin, somatostatin, entero statin, oxyntomodulin, pancreatic peptide, short-chain fatty acids, butyrate, propionate, acetate, serotonin receptor agonists, nicotinamide adenine dinucleotide (NAD), nicotinamide mononucleotide (NMN), nucleotide riboside (NR), nicotinamide, and nicotinic acid (NA). A molecule may be primarily a metabolic effector, or primarily a satiety effector. Alternatively, a molecule may be both a metabolic and satiety effector.

[0243] In some embodiments, the genetically engineered bacteria comprise one or more gene(s) or gene cassette(s) which are capable of producing an effector, which can modulate the inflammatory status. Non-limiting examples include short chain fatty acids, and tryptophan and its metabolites, including indoles, as described herein.

[0244] In some embodiments, the genetically engineered bacteria comprise a gene encoding a non-native metabolic and/or satiety effector and/or immune modulator molecule, and/or a gene cassette encoding a biosynthetic pathway capable of producing a metabolic and/or satiety effector and/or immune modulator molecule, and further comprise gene sequence(s) and/or gene cassette(s) which are capable of producing one or more immune modulators or effector molecules which can modulate the inflammatory status, including, for example, short chain fatty acids, and tryptophan and its metabolites, including indoles, as described herein.

[0245] The effect of the genetically engineered bacteria on the inflammatory status can be measured by methods known in the art, e.g., plasma can be drawn before and after administraton of the genetically engineered bacteria. The erythrocyte sedimentation rate (ESR), C-reactive protein (CRP) and plasma viscosity (PV) blood tests are commonly used to detect this increase n inflammation. In some embodiments the genetically engineered bacteria modulate, e.g. decrease or increase, levels of inflammatory markers, eg.. C-reactive protein (CRP).

[0246] In some embodiments, the genetically engineered bacteria modulate, e.g. decrease, levels of inflammatory growth factors and cytokines, e.g., IL-1(3, IL-6, and/or TNF-α and proinflammatory signaling, e.g. NF-kappaB signaling. In some embodiments the genetically engineered bacteria modulate, e.g. increase, levels of anti-inflammatory growth factors and cytokines, e.g., IL4, IL-10, IL-13, IFN-alpha and/or transforming growth factor-beta.

[0247] In some embodiments, the genetically engineered bacteria produce effectors, which bind to and stimulate the aromatic hydrocarbon receptor. In some embodiments the genetically engineered bacteria stimulate AHR signaling in immune cell types, including T cells, B cells, NK cells, macrophages, and dendritic cells (DCs), and/or in epithelial cells. In some embodiments, the genetically engineered bacteria modulate, e.g., increase the levels of IL-22, e.g., through stimulation of AHR.

[0248] In some emobodiments, the genetically engineered bacteria may reduce gut permeability. In some embodiments, the genetically engineered bacteria may reduce the amounts of LPS and in the circulation, which are increase in metabolic disease, e.g., in NASH.

[0249] The gene or gene cassette for producing the metabolic and/or satiety effector molecule and/or modulator of inflammation may be expressed under the control of a constitutive promoter, a promoter that is induced by exogenous environmental conditions, a promoter that is induced by exogenous environmental conditions, molecules, or metabolites specific to the gut of a mammal, and/or a promoter that is induced by low-oxygen or anaerobic conditions, such as the environment of the mammalian gut.

[0250] The gene or gene cassette for producing the metabolic and/or satiety effector and/or modulator of inflammation may be expressed on a high-copy plasmid, a low-copy plasmid, or a chromosome. In some embodiments, expression from the plasmid may be useful for increasing expression of the metabolic and/or satiety effector and/or immune modulator molecule. In some embodiments, expression from the chromosome may be useful for increasing stability of expression of the metabolic and/or satiety effector molecule. In some embodiments, the gene or gene cassette for producing the metabolic and/or satiety effector and/or immune modulator molecule is integrated into the bacterial chromosome at one or more integration sites in the genetically engineered bacteria. For example, one or more copies of the propionate biosynthesis gene cassette may be integrated into the bacterial chromosome. In some embodiments, the gene or gene cassette for producing the metabolic and/or satiety effector and/or immune modulator molecule is expressed from a plasmid in the genetically engineered bacteria. In some embodiments, the gene or gene cassette for producing the metabolic and/or satiety effector and/or immune modulator molecule is inserted into the bacterial genome at one or more of the following insertion sites in E. coli Nissle: malE/K, araC/BAD, lacZ, thyA, malP/T. Any suitable insertion site may be used (see, e.g. FIG. 57). The insertion site may be anywhere in the genome, e.g., in a gene required for survival and/or growth, such as thyA (to create an auxotroph); in an active area of the genome, such as near the site of genome replication; and/or in between divergent promoters in order to reduce the risk of unintended transcription, such as between AraB and AraC of the arabinose operon. In some embodiments, the genetically engineered bacteria of the invention are capable of expressing a metabolic and/or satiety effector and/or immune modulator molecule that is encoded by a single gene, e.g., the molecule is GLP-1 and encoded by the GLP-1 gene.

[0251] One of skill in the art would appreciate that additional genes and gene cassettes capable of producing metabolic and/or satiety effector molecules and/or modulator of inflammation are known in the art and may be expressed by the genetically engineered bacteria of the invention. In some embodiments, the gene or gene cassette for producing a therapeutic molecule also comprises additional transcription and translation elements, e.g., a ribosome binding site, to enhance expression of the therapeutic molecule.

[0252] In some embodiments, the genetically engineered bacteria produce two or more metabolic and/or satiety effector molecules and/or modulator of inflammation. In certain embodiments, the two or more molecules behave synergistically to ameliorate metabolic disease. In some embodiments, the genetically engineered bacteria express at least one metabolic effector molecule and at least one satiety effector molecule and at least one modulator of inflammation.

### Short Chain Fatty Acids

[0253] Short-chain fatty acids (SCFAs), primarily acetate, propionate, and butyrate, are metabolites formed by gut microbiota from complex dietary carbohydrates. Butyrate and acetate were reported to protect against diet-induced obesity without causing hypophagia, while propionate was shown to reduce food intake. In rodent models of genetic or diet-induced obesity, supplementation of butyrate in diet, and oral administration of acetate was shown to suppress weight gain independent of food intake suppression; Propionate was reported to inhibit food intake in humans (see, e.g., Lin et al., Butyrate and Propionate Protect against Diet-Induced Obesity and Regulate Gut Hormones via Free Fatty Acid Receptor 3-Independent Mechanisms, and refernces therein). Therefore, the production of SCFAs is likely efficacious in the treatment of metabolic syndrome and related disorders, and/or diabetes type2, and/or obesity.

[0254] SCFAs represent a major constituent of the luminal contents of the colon. Among SCFAs butyrate is believed to play an important role for epithelial homeostasis. Acetate and propionate have anti-inflammatory properties, which are comparable to those of butyrate (Tedelind et al., World J Gastroenterol. 2007 May 28; 13(20): 2826-2832. Acetate and propionate, similar to butyrate, inhibit TNFa-mediated activation of the NF-κB pathway. These findings suggest that propionate and acetate, in addition to butyrate, could be efficacious in the treatment of inflammatory conditions.

### Propionate

[0255] In alternate embodiments, the genetically engineered bacteria of the invention are capable of producing a metabolic and/or satiety effector molecule, e.g., propionate that is synthesized by a biosynthetic pathway requiring multiple genes and/or enzymes.

[0256] In some embodiments, the genetically engineered bacteria of the invention comprise a propionate gene cassette and are capable of producing propionate under particular exogenous environmental conditions. The genetically engineered bacteria may express any suitable set of propionate biosynthesis genes (see, e.g., Table 2). Unmodified bacteria that are capable of producing propionate via an endogenous propionate biosynthesis pathway include, but are not limited to, Clostridium propionicum, Megasphaera elsdenii, and Prevotella ruminicola. In some embodiments, the genetically engineered bacteria of the invention comprise propionate biosynthesis genes from a different species, strain, or substrain of bacteria. In some embodiments, the genetically engineered bacteria comprise the genes pct, lcd, and acr from Clostridium propionicum. In some embodiments, the genetically engineered bacteria comprise acrylate pathway genes for propionate biosynthesis, e.g., pct, lcdA, lcdB, lcdC, etfA, acrB, and acrC. In some embodiments, the rate limiting step catalyzed by the Acr enzyme, is replaced by the AcuI from R. sphaeroides, which catalyzes the NADPH-dependent acrylyl-CoA reduction to produce propionyl-CoA. Thus the propionate cassette comprises pct, lcdA, lcdB, lcdC, and acuI. In another embodiment, the homolog of Acul in E coli, yhdH is used. This propionate cassette comprises pct, lcdA, lcdB, lcdC, and yhdH. In alternate embodiments, the genetically engineered bacteria comprise pyruvate pathway genes for propionate biosynthesis, e.g., thrAf^{fbr}, thrB, thrC, ilvA^{fbr}, aceE, aceF, and lpd, and optionally further comprise tesB. In another embodiment, the propionate gene cassette comprises the genes of the Sleepting Beauty Mutase operon, e.g., from E. coli (sbm, ygfD, ygfG, ygfH). The SBM pathway is cyclical and composed of a series of biochemical conversions forming propionate as a fermentative product while regenerating the starting molecule of succinyl-CoA. Sbm converts succinyl CoA to L-methylmalonylCoA, ygfG converts L-methylmalonylCoA into PropionylCoA, and ygfH converts propionylCoA into propionate and succinate into succinylCoA.

[0257] This pathway is very similar to the oxidative propionate pathway of Propionibacteria, which also converts succinate to propionate. Succinyl-CoA is converted to R-methylmalonyl-CoA by methymalonyl-CoA mutase (mutAB). This is in turn converted to S-methylmalonyl-CoA via methymalonyl-CoA epimerase (GI:18042134). There are three genes which encode methylmalonyl-CoA carboxytransferase (mmdA, PFREUD_18870, bccp) which converts methylmalonyl-CoA to propionyl-CoA.

[0258] The genes may be codon-optimized, and translational and transcriptional elements may be added. Table 2-4 lists the nucleic acid sequences of exemplary genes in the propionate biosynthesis gene cassette. Table 5 lists the polypeptide sequences expressed by exemplary propionate biosynthesis genes.

TABLE 2
Propionate Cassette Sequences (Acrylate Pathway)

| Gene sequence | Description |
|---|---|
| pct | ATGCGCAAAGTGCCGATTATCACGGCTGACGAGGCCGCAAAACT |
| SEQ ID NO: 1 | GATCAAGGACGGCGACACCGTGACAACTAGCGGCTTTGTGGGTA |
| | ACGCGATCCCTGAGGCCCTTGACCGTGCAGTCGAAAAGCGTTTC |
| | CTGGAAACGGGCGAACCGAAGAACATTACTTATGTATATTGCGG |
| | CAGTCAGGGCAATCGCGACGGTCGTGGCGCAGAACATTTCGCGC |
| | ATGAAGGCCTGCTGAAACGTTATATCGCTGGCCATTGGGCGACC |
| | GTCCCGGCGTTAGGGAAAATGGCCATGGAGAATAAAATGGAGGC |
| | CTACAATGTCTCTCAGGGCGCCTTGTGTCATCTCTTTCGCGATA |
| | TTGCGAGCCATAAACCGGGTGTGTTCACGAAAGTAGGAATCGGC |
| | ACCTTCATTGATCCACGTAACGGTGGTGGGAAGGTCAACGATAT |
| | TACCAAGGAAGATATCGTAGAACTGGTGGAAATTAAAGGGCAGG |
| | AATACCTGTTTTATCCGGCGTTCCCGATCCATGTCGCGCTGATT |
| | CGTGGCACCTATGCGGACGAGAGTGGTAACATCACCTTTGAAAA |
| | AGAGGTAGCGCCTTTGGAAGGGACTTCTGTCTGTCAAGCGGTGA |
| | AGAACTCGGGTGGCATTGTCGTGGTTCAGGTTGAGCGTGTCGTC |
| | AAAGCAGGCACGCTGGATCCGCGCCATGTGAAAGTTCCGGGTAT |
| | CTATGTAGATTACGTAGTCGTCGCGGATCCGGAGGACCATCAAC |
| | AGTCCCTTGACTGCGAATATGATCCTGCCCTTAGTGGAGAGCAC |
| | CGTCGTCCGGAGGTGGTGGGTGAACCACTGCCTTTATCCGCGAA |
| | GAAAGTCATCGGCCGCCGTGGCGCGATTGAGCTCGAGAAAGACG |
| | TTGCAGTGAACCTTGGGGTAGGTGCACCTGAGTATGTGGCCTCC |
| | GTGGCCGATGAAGAAGGCATTGTGGATTTTATGACTCTCACAGC |
| | GGAGTCCGGCGCTATCGGTGGCGTTCCAGCCGGCGGTGTTCGCT |
| | TTGGGGCGAGCTACAATGCTGACGCCTTGATCGACCAGGGCTAC |
| | CAATTTGATTATTACGACGGTGGGGGTCTGGATCTTTGTTACCT |
| | GGGTTTAGCTGAATGCGACGAAAAGGGTAATATCAATGTTAGCC |
| | GCTTCGGTCCTCGTATCGCTGGGTGCGGCGGATTCATTAACATT |
| | ACCCAAAACACGCCGAAAGTCTTCTTTTGTGGGACCTTTACAGC |
| | CGGGGGGCTGAAAGTGAAAATTGAAGATGGTAAGGTGATTATCG |
| | TTCAGGAAGGGAAACAGAAGAAATTCCTTAAGGCAGTGGAGCAA |
| | ATCACCTTTAATGGAGACGTGGCCTTAGCGAACAAGCAACAAGT |
| | TACCTACATCACGGAGCGTTGCGTCTTCCTCCTCAAAGAAGACG |
| | GTTTACACCTTTCGGAAATCGCGCCAGGCATCGATCTGCAGACC |
| | CAGATTTTGGATGTTATGGACTTTGCCCCGATCATTGATCGTGA |
| | CGCAAACGGGCAGATTAAACTGATGGACGCGGCGTTATTCGCAG |
| | AAGGGCTGATGGGCTTGAAAGAAATGAAGTCTTAA |
| lcdA | ATGAGCTTAACCCAAGGCATGAAAGCTAAACAACTGTTAGCATA |
| SEQ ID NO: 2 | CTTTCAGGGTAAAGCCGATCAGGATGCACGTGAAGCGAAAGCCC |
| | GCGGTGAGCTGGTCTGCTGGTCGGCGTCAGTCGCGCCGCCGGAA |
| | TTTTGCGTAACAATGGGCATTGCCATGATCTACCCGGAGACTCA |
| | TGCAGCGGGCATCGGTGCCCGCAAAGGTGCGATGGACATGCTGG |
| | AAGTTGCGGACCGCAAAGGCTACAACGTGGATTGTTGTTCCTAC |
| | GGCCGTGTAAATATGGGTTACATGGAATGTTTAAAAGAAGCCGC |
| | CATCACGGGCGTCAAGCCGGAAGTTTTGGTTAATTCCCCTGCTG |
| | CTGACGTTCCGCTTCCCGATTTGGTGATTACGTGTAATAATATC |
| | TGTAACACGCTGCTGAAATGGTACGAAAACTTAGCAGCAGAACT |
| | CGATATTCCTTGCATCGTGATCGACGTACCGTTTAATCATACCA |
| | TGCCGATTCCGGAATATGCCAAGGCCTACATCGCGGACCAGTTC |
| | CGCAATGCAATTTCTCAGCTGGAAGTTATTTGTGGCCGTCCGTT |
| | CGATTGGAAGAAATTTAAGGAGGTCAAAGATCAGACCCAGCGTA |
| | GCGTATACCACTGGAACCGCATTGCCGAGATGGCGAAATACAAG |
| | CCTAGCCCGCTGAACGGCTTCGATCTGTTCAATTACATGGCGTT |
| | AATCGTGGCGTGCCGCAGCCTGGATTATGCAGAAATTACCTTTA |
| | AAGCGTTCGCGGACGAATTAGAAGAGAATTTGAAGGCGGGTATC |
| | TACGCCTTTAAAGGTGCGGAAAAAACGCGCTTTCAATGGGAAGG |
| | TATCGCGGTGTGGCCACATTTAGGTCACACGTTTAAATCTATGA |
| | AGAATCTGAATTCGATTATGACCGGTACGGCATACCCCGCCCTT |
| | TGGGACCTGCACTATGACGCTAACGACGAATCTATGCACTCTAT |
| | GGCTGAAGCGTACACCCGTATTTATATTAATACTTGTCTGCAGA |
| | ACAAAGTAGAGGTCCTGCTTGGGATCATGGAAAAAGGCCAGGTG |
| | GATGGTACCGTATATCATCTGAATCGCAGCTGCAAACTGATGAG |
| | TTTCCTGAACGTGGAAACGGCTGAAATTATTAAAGAGAAGAACG |
| | GTCTTCCTTACGTCTCCATTGATGGCGATCAGACCGATCCTCGC |
| | GTTTTTTCTCCGGCCCAGTTTGATACCCGTGTTCAGGCCCTGGT |
| | TGAGATGATGGAGGCCAATATGGCGGCAGCGGAATAA |
| lcdB | ATGTCACGCGTGGAGGCAATCCTGTCGCAGCTGAAAGATGTCGC |
| SEQ ID NO: 3 | CGCGAATCCGAAAAAAGCCATGGATGACTATAAAGCTGAAACAG |
| | GTAAGGGCGCGGTTGGTATCATGCCGATCTACAGCCCCGAAGAA |
| | ATGGTACACGCCGCTGGCTATTTGCCGATGGGAATCTGGGGCGC |
| | CCAGGGCAAAACGATTAGTAAAGCGCGCACCTATCTGCCTGCTT |
| | TTGCCTGCAGCGTAATGCAGCAGGTTATGGAATTACAGTGCGAG |
| | GGCGCGTATGATGACCTGTCCGCAGTTATTTTTAGCGTACCGTG |
| | CGACACTCTCAAATGTCTTAGCCAGAAATGGAAAGGTACGTCCC |
| | CAGTGATTGTATTTACGCATCCGCAGAACCGCGGATTAGAAGCG |
| | GCGAACCAATTCTTGGTTACCGAGTATGAACTGGTAAAAGCACA |
| | ACTGGAATCAGTTCTGGGTGTGAAAATTTCAAACGCCGCCCTGG |
| | AAAATTCGATTGCAATTTATAACGAGAATCGTGCCGTGATGCGT |
| | GAGTTCGTGAAAGTGGCAGCGGACTATCCTCAAGTCATTGACGC |
| | AGTGAGCCGCCACGCGGTTTTTAAAGCGCGCCAGTTTATGCTTA |
| | AGGAAAAACATACCGCACTTGTGAAAGAACTGATCGCTGAGATT |
| | AAAGCAACGCCAGTCCAGCCGTGGGACGGAAAAAAGGTTGTAGT |
| | GACGGGCATTCTGTTGGAACCGAATGAGTTATTAGATATCTTTA |
| | ATGAGTTTAAGATCGCGATTGTTGATGATGATTTAGCGCAGGAA |
| | AGCCGTCAGATCCGTGTTGACGTTCTGGACGGAGAAGGCGGACC |
| | GCTCTACCGTATGGCTAAAGCGTGGCAGCAAATGTATGGCTGCT |
| | CGCTGGCAACCGACACCAAGAAGGGTCGCGGCCGTATGTTAATT |
| | AACAAAACGATTCAGACCGGTGCGGACGCTATCGTAGTTGCAAT |
| | GATGAAGTTTTGCGACCCAGAAGAATGGGATTATCCGGTAATGT |
| | ACCGTGAATTTGAAGAAAAAGGGGTCAAATCACTTATGATTGAG |
| | GTGGATCAGGAAGTATCGTCTTTCGAACAGATTAAAACCCGTCT |
| | GCAGTCATTCGTCGAAATGCTTTAA |
| lcdC | ATGTATACCTTGGGGATTGATGTCGGTTCTGCCTCTAGTAAAGC |
| SEQ ID NO: 4 | GGTGATTCTGAAAGATGGAAAAGATATTGTCGCTGCCGAGGTTG |
| | TCCAAGTCGGTACCGGCTCCTCGGGTCCCCAACGCGCACTGGAC |
| | AAAGCCTTTGAAGTCTCTGGCTTAAAAAAGGAAGACATCAGCTA |
| | CACAGTAGCTACGGGCTATGGGCGCTTCAATTTTAGCGACGCGG |
| | ATAAACAGATTTCGGAAATTAGCTGTCATGCCAAAGGCATTTAT |
| | TTCTTAGTACCAACTGCGCGCACTATTATTGACATTGGCGGCCA |
| | AGATGCGAAAGCCATCCGCCTGGACGACAAGGGGGGTATTAAGC |
| | AATTCTTCATGAATGATAAATGCGCGGCGGGCACGGGGCGTTTC |
| | CTGGAAGTCATGGCTCGCGTACTTGAAACCACCCTGGATGAAAT |
| | GGCTGAACTGGATGAACAGGCGACTGACACCGCTCCCATTTCAA |
| | GCACCTGCACGGTTTTCGCCGAAAGCGAAGTAATTAGCCAATTG |
| | AGCAATGGTGTCTCACGCAACAACATCATTAAAGGTGTCCATCT |
| | GAGCGTTGCGTCACGTGCGTGTGGTCTGGCGTATCGCGGCGGTT |
| | TGGAGAAAGATGTTGTTATGACAGGTGGCGTGGCAAAAAATGCA |
| | GGGGTGGTGCGCGCGGTGGCGGGCGTTCTGAAGACCGATGTTAT |
| | CGTTGCTCCGAATCCTCAGACGACCGGTGCACTGGGGGCAGCGC |
| | TGTATGCTTATGAGGCCGCCCAGAAGAAGTA |
| etfA | ATGGCCTTCAATAGCGCAGATATTAATTCTTTCCGCGATATTTG |
| SEQ ID NO: 5 | GGTGTTTTGTGAACAGCGTGAGGGCAAACTGATTAACACCGATT |
| | TCGAATTAATTAGCGAAGGTCGTAAACTGGCTGACGAACGCGGA |
| | AGCAAACTGGTTGGAATTTTGCTGGGGCACGAAGTTGAAGAAAT |
| | CGCAAAAGAATTAGGCGGCTATGGTGCGGACAAGGTAATTGTGT |
| | GCGATCATCCGGAACTTAAATTTTACACTACGGATGCTTATGCC |
| | AAAGTTTTATGTGACGTCGTGATGGAAGAGAAACCGGAGGTAAT |
| | TTTGATCGGTGCCACCAACATTGGCCGTGATCTCGGACCGCGTT |
| | GTGCTGCACGCTTGCACACGGGGCTGACGGCTGATTGCACGCAC |
| | CTGGATATTGATATGAATAAATATGTGGACTTTCTTAGCACCAG |
| | TAGCACCTTGGATATCTCGTCGATGACTTTCCCTATGGAAGATA |
| | CAAACCTTAAAATGACGCGCCCTGCATTTGGCGGACATCTGATG |
| | GCAACGATCATTTGTCCACGCTTCCGTCCCTGTATGAGCACAGT |
| | GCGCCCCGGAGTGATGAAGAAAGCGGAGTTCTCGCAGGAGATGG |
| | CGCAAGCATGTCAAGTAGTGACCCGTCACGTAAATTTGTCGGAT |
| | GAAGACCTTAAAACTAAAGTAATTAATATCGTGAAGGAAACGAA |
| | AAAGATTGTGGATCTGATCGGCGCAGAAATTATTGTGTCAGTTG |
| | GTCGTGGTATCTCGAAAGATGTCCAAGGTGGAATTGCACTGGCT |
| | GAAAAACTTGCGGACGCATTTGGTAACGGTGTCGTGGGCGGCTC |
| | GCGCGCAGTGATTGATTCCGGCTGGTTACCTGCGGATCATCAGG |
| | TTGGACAAACCGGTAAGACCGTGCACCCGAAAGTCTACGTGGCG |
| | CTGGGTATTAGTGGGGCTATCCAGCATAAGGCTGGGATGCAAGA |
| | CTCTGAACTGATCATTGCCGTCAACAAAGACGAAACGGCGCCTA |
| | TCTTCGACTGCGCCGATTATGGCATCACCGGTGATTTATTTAAA |
| | ATCGTACCGATGATGATCGACGCGATCAAAGAGGGTAAAAACGC |
| | ATGA |
| acrB | ATGCGCATCTATGTGTGTGTGAAACAAGTCCCAGATACGAGCGG |
| SEQ ID NO: 6 | CAAGGTGGCCGTTAACCCTGATGGGACCCTTAACCGTGCCTCAA |
| | TGGCAGCGATTATTAACCCGGACGATATGTCCGCGATCGAACAG |
| | GCATTAAAACTGAAAGATGAAACCGGATGCCAGGTTACGGCGCT |
| | TACGATGGGTCCTCCTCCTGCCGAGGGCATGTTGCGCGAAATTA |
| | TTGCAATGGGGGCCGACGATGGTGTGCTGATTTCGGCCCGTGAA |
| | TTTGGGGGGTCCGATACCTTCGCAACCAGTCAAATTATTAGCGC |
| | GGCAATCCATAAATTAGGCTTAAGCAATGAAGACATGATCTTTT |
| | GCGGTCGTCAGGCCATTGACGGTGATACGGCCCAAGTCGGCCCT |
| | CAAATTGCCGAAAAACTGAGCATCCCACAGGTAACCTATGGCGC |
| | AGGAATCAAAAAATCTGGTGATTTAGTGCTGGTGAAGCGTATGT |
| | TGGAGGATGGTTATATGATGATCGAAGTCGAAACTCCATGTCTG |
| | ATTACCTGCATTCAGGATAAAGCGGTAAAACCACGTTACATGAC |
| | TCTCAACGGTATTATGGAATGCTACTCCAAGCCGCTCCTCGTTC |
| | TCGATTACGAAGCACTGAAAGATGAACCGCTGATCGAACTTGAT |
| | ACCATTGGGCTTAAAGGCTCCCCGACGAATATCTTTAAATCGTT |
| | TACGCCGCCTCAGAAAGGCGTTGGTGTCATGCTCCAAGGCACCG |
| | ATAAGGAAAAAGTCGAGGATCTGGTGGATAAGCTGATGCAGAAA |
| | CATGTCATCTAA |
| acrC | ATGTTCTTACTGAAGATTAAAAAAGAACGTATGAAACGCATGGA |
| SEQ ID NO: 7 | CTTTAGTTTAACGCGTGAACAGGAGATGTTAAAAAAACTGGCGC |
| | GTCAGTTTGCTGAGATCGAGCTGGAACCGGTGGCCGAAGAGATT |
| | GATCGTGAGCACGTTTTTCCTGCAGAAAACTTTAAGAAGATGGC |
| | GGAAATTGGCTTAACCGGCATTGGTATCCCGAAAGAATTTGGTG |
| | GCTCCGGTGGAGGCACCCTGGAGAAGGTCATTGCCGTGTCAGAA |
| | TTCGGCAAAAAGTGTATGGCCTCAGCTTCCATTTTAAGCATTCA |
| | TCTTATCGCGCCGCAGGCAATCTACAAATATGGGACCAAAGAAC |
| | AGAAAGAGACGTACCTGCCGCGTCTTACCAAAGGTGGTGAACTG |
| | GGCGCCTTTGCGCTGACAGAACCAAACGCCGGAAGCGATGCCGG |
| | CGCGGTAAAAACGACCGCGATTCTGGACAGCCAGACAAACGAGT |
| | ACGTGCTGAATGGCACCAAATGCTTTATCAGCGGGGGCGGGCGC |
| | GCGGGTGTTCTTGTAATTTTTGCGCTTACTGAACCGAAAAAAGG |
| | TCTGAAAGGGATGAGCGCGATTATCGTGGAGAAAGGGACCCCGG |
| | GCTTCAGCATCGGCAAGGTGGAGAGCAAGATGGGGATCGCAGGT |
| | TCGGAAACCGCGGAACTTATCTTCGAAGATTGTCGCGTTCCGGC |
| | TGCCAACCTTTTAGGTAAAGAAGGCAAAGGCTTTAAAATTGCTA |
| | TGGAAGCCCTGGATGGCGCCCGTATTGGCGTGGGCGCTCAAGCA |
| | ATCGGAATTGCCGAGGGGGCGATCGACCTGAGTGTGAAGTACGT |
| | TCACGAGCGCATTCAATTTGGTAAACCGATCGCGAATCTGCAGG |
| | GAATTCAATGGTATATCGCGGATATGGCGACCAAAACCGCCGCG |
| | GCACGCGCACTTGTTGAGTTTGCAGCGTATCTTGAAGACGCGGG |
| | TAAACCGTTCACAAAGGAATCTGCTATGTGCAAGCTGAACGCCT |
| | CCGAAAACGCGCGTTTTGTGACAAATTTAGCTCTGCAGATTCAC |
| | GGGGGTTACGGTTATATGAAAGATTATCCGTTAGAGCGTATGTA |
| | TCGCGATGCTAAGATTACGGAAATTTACGAGGGGACATCAGAAA |
| | TCCATAAGGTGGTGATTGCGCGTGAAGTAATGAAACGCTAA |
| thr^{fbr} | ATGCGAGTGTTGAAGTTCGGCGGTACATCAGTGGCAAATGCAGA |
| SEQ ID NO: 8 | ACGTTTTCTGCGTGTTGCCGATATTCTGGAAAGCAATGCCAGGC |
| | AGGGGCAGGTGGCCACCGTCCTCTCTGCCCCCGCCAAAATCACC |
| | AACCACCTGGTGGCGATGATTGAAAAAACCATTAGCGGCCAGGA |
| | TGCTTTACCCAATATCAGCGATGCCGAACGTATTTTTGCCGAAC |
| | TTTTGACGGGACTCGCCGCCGCCCAGCCGGGGTTCCCGCTGGCG |
| | CAATTGAAAACTTTCGTCGATCAGGAATTTGCCCAAATAAAACA |
| | TGTCCTGCATGGCATTAGTTTGTTGGGGCAGTGCCCGGATAGCA |
| | TCAACGCTGCGCTGATTTGCCGTGGCGAGAAAATGTCGATCGCC |
| | ATTATGGCCGGCGTATTAGAAGCGCGCGGTCACAACGTTACTGT |
| | TATCGATCCGGTCGAAAAACTGCTGGCAGTGGGGCATTACCTCG |
| | AATCTACCGTCGATATTGCTGAGTCCACCCGCCGTATTGCGGCA |
| | AGCCGCATTCCGGCTGATCACATGGTGCTGATGGCAGGTTTCAC |
| | CGCCGGTAATGAAAAAGGCGAACTGGTGGTGCTTGGACGCAACG |
| | GTTCCGACTACTCTGCTGCGGTGCTGGCTGCCTGTTTACGCGCC |
| | GATTGTTGCGAGATTTGGACGGACGTTGACGGGGTCTATACCTG |
| | CGACCCGCGTCAGGTGCCCGATGCGAGGTTGTTGAAGTCGATGT |
| | CCTACCAGGAAGCGATGGAGCTTTCCTACTTCGGCGCTAAAGTT |
| | CTTCACCCCCGCACCATTACCCCCATCGCCCAGTTCCAGATCCC |
| | TTGCCTGATTAAAAATACCGGAAATCCTCAAGCACCAGGTACGC |
| | TCATTGGTGCCAGCCGTGATGAAGACGAATTACCGGTCAAGGGC |
| | ATTTCCAATCTGAATAACATGGCAATGTTCAGCGTTTCTGGTCC |
| | GGGGATGAAAGGGATGGTCGGCATGGCGGCGCGCGTCTTTGCAG |
| | CGATGTCACGCGCCCGTATTTCCGTGGTGCTGATTACGCAATCA |
| | TCTTCCGAATACAGCATCAGTTTCTGCGTTCCACAAAGCGACTG |
| | TGTGCGAGCTGAACGGGCAATGCAGGAAGAGTTCTACCTGGAAC |
| | TGAAAGAAGGCTTACTGGAGCCGCTGGCAGTGACGGAACGGCTG |
| | GCCATTATCTCGGTGGTAGGTGATGGTATGCGCACCTTGCGTGG |
| | GATCTCGGCGAAATTCTTTGCCGCACTGGCCCGCGCCAATATCA |
| | ACATTGTCGCCATTGCTCAGAGATCTTCTGAACGCTCAATCTCT |
| | GTCGTGGTAAATAACGATGATGCGACCACTGGCGTGCGCGTTAC |
| | TCATCAGATGCTGTTCAATACCGATCAGGTTATCGAAGTGTTTG |
| | TGATTGGCGTCGGTGGCGTTGGCGGTGCGCTGCTGGAGCAACTG |
| | AAGCGTCAGCAAAGCTGGCTGAAGAATAAACATATCGACTTACG |
| | TGTCTGCGGTGTTGCCAACTCGAAGGCTCTGCTCACCAATGTAC |
| | ATGGCCTTAATCTGGAAAACTGGCAGGAAGAACTGGCGCAAGCC |
| | AAAGAGCCGTTTAATCTCGGGCGCTTAATTCGCCTCGTGAAAGA |
| | ATATCATCTGCTGAACCCGGTCATTGTTGACTGCACTTCCAGCC |
| | AGGCAGTGGCGGATCAATATGCCGACTTCCTGCGCGAAGGTTTC |
| | CACGTTGTCACGCCGAACAAAAAGGCCAACACCTCGTCGATGGA |
| | TTACTACCATCAGTTGCGTTATGCGGCGGAAAAATCGCGGCGTA |
| | AATTCCTCTATGACACCAACGTTGGGGCTGGATTACCGGTTATT |
| | GAGAACCTGCAAAATCTGCTCAATGCAGGTGATGAATTGATGAA |
| | GTTCTCCGGCATTCTTTCTGGTTCGCTTTCTTATATCTTCGGCA |
| | AGTTAGACGAAGGCATGAGTTTCTCCGAGGCGACCACGCTGGCG |
| | CGGGAAATGGGTTATACCGAACCGGACCCGCGAGATGATCTTTC |
| | TGGTATGGATGTGGCGCGTAAACTATTGATTCTCGCTCGTGAAA |
| | CGGGACGTGAACTGGAGCTGGCGGATATTGAAATTGAACCTGTG |
| | CTGCCCGCAGAGTTTAACGCCGAGGGTGATGTTGCCGCTTTTAT |
| | GGCGAATCTGTCACAACTCGACGATCTCTTTGCCGCGCGCGTGG |
| | CGAAGGCCCGTGATGAAGGAAAAGTTTTGCGCTATGTTGGCAAT |
| | ATTGATGAAGATGGCGTCTGCCGCGTGAAGATTGCCGAAGTGGA |
| | TGGTAATGATCCGCTGTTCAAAGTGAAAAATGGCGAAAACGCCC |
| | TGGCCTTCTATAGCCACTATTATCAGCCGCTGCCGTTGGTACTG |
| | CGCGGATATGGTGCGGGCAATGACGTTACAGCTGCCGGTGTCTT |
| | TGCTGATCTGCTACGTACCCTCTCATGGAAGTTAGGAGTCTGA |
| thrB | ATGGTTAAAGTTTATGCCCCGGCTTCCAGTGCCAATATGAGCGT |
| SEQ ID NO: 9 | CGGGTTTGATGTGCTCGGGGCGGCGGTGACACCTGTTGATGGTG |
| | CATTGCTCGGAGATGTAGTCACGGTTGAGGCGGCAGAGACATTC |
| | AGTCTCAACAACCTCGGACGCTTTGCCGATAAGCTGCCGTCAGA |
| | ACCACGGGAAAATATCGTTTATCAGTGCTGGGAGCGTTTTTGCC |
| | AGGAACTGGGTAAGCAAATTCCAGTGGCGATGACCCTGGAAAAG |
| | AATATGCCGATCGGTTCGGGCTTAGGCTCCAGTGCCTGTTCGGT |
| | GGTCGCGGCGCTGATGGCGATGAATGAACACTGCGGCAAGCCGC |
| | TTAATGACACTCGTTTGCTGGCTTTGATGGGCGAGCTGGAAGGC |
| | CGTATCTCCGGCAGCATTCATTACGACAACGTGGCACCGTGTTT |
| | TCTCGGTGGTATGCAGTTGATGATCGAAGAAAACGACATCATCA |
| | GCCAGCAAGTGCCAGGGTTTGATGAGTGGCTGTGGGTGCTGGCG |
| | TATCCGGGGATTAAAGTCTCGACGGCAGAAGCCAGGGCTATTTT |
| | ACCGGCGCAGTATCGCCGCCAGGATTGCATTGCGCACGGGCGAC |
| | ATCTGGCAGGCTTCATTCACGCCTGCTATTCCCGTCAGCCTGAG |
| | CTTGCCGCGAAGCTGATGAAAGATGTTATCGCTGAACCCTACCG |
| | TGAACGGTTACTGCCAGGCTTCCGGCAGGCGCGGCAGGCGGTCG |
| | CGGAAATCGGCGCGGTAGCGAGCGGTATCTCCGGCTCCGGCCCG |
| | ACCTTGTTCGCTCTGTGTGACAAGCCGGAAACCGCCCAGCGCGT |
| | TGCCGACTGGTTGGGTAAGAACTACCTGCAAAATCAGGAAGGTT |
| | TTGTTCATATTTGCCGGCTGGATACGGCGGGCGCACGAGTACTG |
| | GAAAACTAA |
| thrC | ATGAAACTCTACAATCTGAAAGATCACAACGAGCAGGTCAGCTT |
| SEQ ID NO: 10 | TGCGCAAGCCGTAACCCAGGGGTTGGGCAAAAATCAGGGGCTGT |
| | TTTTTCCGCACGACCTGCCGGAATTCAGCCTGACTGAAATTGAT |
| | GAGATGCTGAAGCTGGATTTTGTCACCCGCAGTGCGAAGATCCT |
| | CTCGGCGTTTATTGGTGATGAAATCCCACAGGAAATCCTGGAAG |
| | AGCGCGTGCGCGCGGCGTTTGCCTTCCCGGCTCCGGTCGCCAAT |
| | GTTGAAAGCGATGTCGGTTGTCTGGAATTGTTCCACGGGCCAAC |
| | GCTGGCATTTAAAGATTTCGGCGGTCGCTTTATGGCACAAATGC |
| | TGACCCATATTGCGGGTGATAAGCCAGTGACCATTCTGACCGCG |
| | ACCTCCGGTGATACCGGAGCGGCAGTGGCTCATGCTTTCTACGG |
| | TTTACCGAATGTGAAAGTGGTTATCCTCTATCCACGAGGCAAAA |
| | TCAGTCCACTGCAAGAAAAACTGTTCTGTACATTGGGCGGCAAT |
| | ATCGAAACTGTTGCCATCGACGGCGATTTCGATGCCTGTCAGGC |
| | GCTGGTGAAGCAGGCGTTTGATGATGAAGAACTGAAAGTGGCGC |
| | TAGGGTTAAACTCGGCTAACTCGATTAACATCAGCCGTTTGCTG |
| | GCGCAGATTTGCTACTACTTTGAAGCTGTTGCGCAGCTGCCGCA |
| | GGAGACGCGCAACCAGCTGGTTGTCTCGGTGCCAAGCGGAAACT |
| | TCGGCGATTTGACGGCGGGTCTGCTGGCGAAGTCACTCGGTCTG |
| | CCGGTGAAACGTTTTATTGCTGCGACCAACGTGAACGATACCGT |
| | GCCACGTTTCCTGCACGACGGTCAGTGGTCACCCAAAGCGACTC |
| | AGGCGACGTTATCCAACGCGATGGACGTGAGTCAGCCGAACAAC |
| | TGGCCGCGTGTGGAAGAGTTGTTCCGCCGCAAAATCTGGCAACT |
| | GAAAGAGCTGGGTTATGCAGCCGTGGATGATGAAACCACGCAAC |
| | AGACAATGCGTGAGTTAAAAGAACTGGGCTACACTTCGGAGCCG |
| | CACGCTGCCGTAGCTTATCGTGCGCTGCGTGATCAGTTGAATCC |
| | AGGCGAATATGGCTTGTTCCTCGGCACCGCGCATCCGGCGAAAT |
| | TTAAAGAGAGCGTGGAAGCGATTCTCGGTGAAACGTTGGATCTG |
| | CCAAAAGAGCTGGCAGAACGTGCTGATTTACCCTTGCTTTCACA |
| | TAATCTGCCCGCCGATTTTGCTGCGTTGCGTAAATTGATGATGA |
| | ATCATCAGTAA |
| ilvA^{fbr} | ATGAGTGAAACATACGTGTCTGAGAAAAGTCCAGGAGTGATGGC |
| SEQ ID NO: 11 | TAGCGGAGCGGAGCTGATTCGTGCCGCCGACATTCAAACGGCGC |
| | AGGCACGAATTTCCTCCGTCATTGCACCAACTCCATTGCAGTAT |
| | TGCCCTCGTCTTTCTGAGGAAACCGGAGCGGAAATCTACCTTAA |
| | GCGTGAGGATCTGCAGGATGTTCGTTCCTACAAGATCCGCGGTG |
| | CGCTGAACTCTGGAGCGCAGCTCACCCAAGAGCAGCGCGATGCA |
| | GGTATCGTTGCCGCATCTGCAGGTAACCATGCCCAGGGCGTGGC |
| | CTATGTGTGCAAGTCCTTGGGCGTTCAGGGACGCATCTATGTTC |
| | CTGTGCAGACTCCAAAGCAAAAGCGTGACCGCATCATGGTTCAC |
| | GGCGGAGAGTTTGTCTCCTTGGTGGTCACTGGCAATAACTTCGA |
| | CGAAGCATCGGCTGCAGCGCATGAAGATGCAGAGCGCACCGGCG |
| | CAACGCTGATCGAGCCTTTCGATGCTCGCAACACCGTCATCGGT |
| | CAGGGCACCGTGGCTGCTGAGATCTTGTCGCAGCTGACTTCCAT |
| | GGGCAAGAGTGCAGATCACGTGATGGTTCCAGTCGGCGGTGGCG |
| | GACTTCTTGCAGGTGTGGTCAGCTACATGGCTGATATGGCACCT |
| | CGCACTGCGATCGTTGGTATCGAACCAGCGGGAGCAGCATCCAT |
| | GCAGGCTGCATTGCACAATGGTGGACCAATCACTTTGGAGACTG |
| | TTGATCCCTTTGTGGACGGCGCAGCAGTCAAACGTGTCGGAGAT |
| | CTCAACTACACCATCGTGGAGAAGAACCAGGGTCGCGTGCACAT |
| | GATGAGCGCGACCGAGGGCGCTGTGTGTACTGAGATGCTCGATC |
| | TTTACCAAAACGAAGGCATCATCGCGGAGCCTGCTGGCGCGCTG |
| | TCTATCGCTGGGTTGAAGGAAATGTCCTTTGCACCTGGTTCTGC |
| | AGTGGTGTGCATCATCTCTGGTGGCAACAACGATGTGCTGCGTT |
| | ATGCGGAAATCGCTGAGCGCTCCTTGGTGCACCGCGGTTTGAAG |
| | CACTACTTCTTGGTGAACTTCCCGCAAAAGCCTGGTCAGTTGCG |
| | TCACTTCCTGGAAGATATCCTGGGACCGGATGATGACATCACGC |
| | TGTTTGAGTACCTCAAGCGCAACAACCGTGAGACCGGTACTGCG |
| | TTGGTGGGTATTCACTTGAGTGAAGCATCAGGATTGGATTCTTT |
| | GCTGGAACGTATGGAGGAATCGGCAATTGATTCCCGTCGCCTCG |
| | AGCCGGGCACCCCTGAGTACGAATACTTGACCTAA |
| aceE | ATGTCAGAACGTTTCCCAAATGACGTGGATCCGATCGAAACTCG |
| SEQ ID NO: 12 | CGACTGGCTCCAGGCGATCGAATCGGTCATCCGTGAAGAAGGTG |
| | TTGAGCGTGCTCAGTATCTGATCGACCAACTGCTTGCTGAAGCC |
| | CGCAAAGGCGGTGTAAACGTAGCCGCAGGCACAGGTATCAGCAA |
| | CTACATCAACACCATCCCCGTTGAAGAACAACCGGAGTATCCGG |
| | GTAATCTGGAACTGGAACGCCGTATTCGTTCAGCTATCCGCTGG |
| | AACGCCATCATGACGGTGCTGCGTGCGTCGAAAAAAGACCTCGA |
| | ACTGGGCGGCCATATGGCGTCCTTCCAGTCTTCCGCAACCATTT |
| | ATGATGTGTGCTTTAACCACTTCTTCCGTGCACGCAACGAGCAG |
| | GATGGCGGCGACCTGGTTTACTTCCAGGGCCACATCTCCCCGGG |
| | CGTGTACGCTCGTGCTTTCCTGGAAGGTCGTCTGACTCAGGAGC |
| | AGCTGGATAACTTCCGTCAGGAAGTTCACGGCAATGGCCTCTCT |
| | TCCTATCCGCACCCGAAACTGATGCCGGAATTCTGGCAGTTCCC |
| | GACCGTATCTATGGGTCTGGGTCCGATTGGTGCTATTTACCAGG |
| | CTAAATTCCTGAAATATCTGGAACACCGTGGCCTGAAAGATACC |
| | TCTAAACAAACCGTTTACGCGTTCCTCGGTGACGGTGAAATGGA |
| | CGAACCGGAATCCAAAGGTGCGATCACCATCGCTACCCGTGAAA |
| | AACTGGATAACCTGGTCTTCGTTATCAACTGTAACCTGCAGCGT |
| | CTTGACGGCCCGGTCACCGGTAACGGCAAGATCATCAACGAACT |
| | GGAAGGCATCTTCGAAGGTGCTGGCTGGAACGTGATCAAAGTGA |
| | TGTGGGGTAGCCGTTGGGATGAACTGCTGCGTAAGGATACCAGC |
| | GGTAAACTGATCCAGCTGATGAACGAAACCGTTGACGGCGACTA |
| | CCAGACCTTCAAATCGAAAGATGGTGCGTACGTTCGTGAACACT |
| | TCTTCGGTAAATATCCTGAAACCGCAGCACTGGTTGCAGACTGG |
| | ACTGACGAGCAGATCTGGGCACTGAACCGTGGTGGTCACGATCC |
| | GAAGAAAATCTACGCTGCATTCAAGAAAGCGCAGGAAACCAAAG |
| | GCAAAGCGACAGTAATCCTTGCTCATACCATTAAAGGTTACGGC |
| | ATGGGCGACGCGGCTGAAGGTAAAAACATCGCGCACCAGGTTAA |
| | GAAAATGAACATGGACGGTGTGCGTCATATCCGCGACCGTTTCA |
| | ATGTGCCGGTGTCTGATGCAGATATCGAAAAACTGCCGTACATC |
| | ACCTTCCCGGAAGGTTCTGAAGAGCATACCTATCTGCACGCTCA |
| | GCGTCAGAAACTGCACGGTTATCTGCCAAGCCGTCAGCCGAACT |
| | TCACCGAGAAGCTTGAGCTGCCGAGCCTGCAAGACTTCGGCGCG |
| | CTGTTGGAAGAGCAGAGCAAAGAGATCTCTACCACTATCGCTTT |
| | CGTTCGTGCTCTGAACGTGATGCTGAAGAACAAGTCGATCAAAG |
| | ATCGTCTGGTACCGATCATCGCCGACGAAGCGCGTACTTTCGGT |
| | ATGGAAGGTCTGTTCCGTCAGATTGGTATTTACAGCCCGAACGG |
| | TCAGCAGTACACCCCGCAGGACCGCGAGCAGGTTGCTTACTATA |
| | AAGAAGACGAGAAAGGTCAGATTCTGCAGGAAGGGATCAACGAG |
| | CTGGGCGCAGGTTGTTCCTGGCTGGCAGCGGCGACCTCTTACAG |
| | CACCAACAATCTGCCGATGATCCCGTTCTACATCTATTACTCGA |
| | TGTTCGGCTTCCAGCGTATTGGCGATCTGTGCTGGGCGGCTGGC |
| | GACCAGCAAGCGCGTGGCTTCCTGATCGGCGGTACTTCCGGTCG |
| | TACCACCCTGAACGGCGAAGGTCTGCAGCACGAAGATGGTCACA |
| | GCCACATTCAGTCGCTGACTATCCCGAACTGTATCTCTTACGAC |
| | CCGGCTTACGCTTACGAAGTTGCTGTCATCATGCATGACGGTCT |
| | GGAGCGTATGTACGGTGAAAAACAAGAGAACGTTTACTACTACA |
| | TCACTACGCTGAACGAAAACTACCACATGCCGGCAATGCCGGAA |
| | GGTGCTGAGGAAGGTATCCGTAAAGGTATCTACAAACTCGAAAC |
| | TATTGAAGGTAGCAAAGGTAAAGTTCAGCTGCTCGGCTCCGGTT |
| | CTATCCTGCGTCACGTCCGTGAAGCAGCTGAGATCCTGGCGAAA |
| | GATTACGGCGTAGGTTCTGACGTTTATAGCGTGACCTCCTTCAC |
| | CGAGCTGGCGCGTGATGGTCAGGATTGTGAACGCTGGAACATGC |
| | TGCACCCGCTGGAAACTCCGCGCGTTCCGTATATCGCTCAGGTG |
| | ATGAACGACGCTCCGGCAGTGGCATCTACCGACTATATGAAACT |
| | GTTCGCTGAGCAGGTCCGTACTTACGTACCGGCTGACGACTACC |
| | GCGTACTGGGTACTGATGGCTTCGGTCGTTCCGACAGCCGTGAG |
| | AACCTGCGTCACCACTTCGAAGTTGATGCTTCTTATGTCGTGGT |
| | TGCGGCGCTGGGCGAACTGGCTAAACGTGGCGAAATCGATAAGA |
| | AAGTGGTTGCTGACGCAATCGCCAAATTCAACATCGATGCAGAT |
| | AAAGTTAACCCGCGTCTGGCGTAA |
| aceF | ATGGCTATCGAAATCAAAGTACCGGACATCGGGGCTGATGAAGT |
| SEQ ID NO: 13 | TGAAATCACCGAGATCCTGGTCAAAGTGGGCGACAAAGTTGAAG |
| | CCGAACAGTCGCTGATCACCGTAGAAGGCGACAAAGCCTCTATG |
| | GAAGTTCCGTCTCCGCAGGCGGGTATCGTTAAAGAGATCAAAGT |
| | CTCTGTTGGCGATAAAACCCAGACCGGCGCACTGATTATGATTT |
| | TCGATTCCGCCGACGGTGCAGCAGACGCTGCACCTGCTCAGGCA |
| | GAAGAGAAGAAAGAAGCAGCTCCGGCAGCAGCACCAGCGGCTGC |
| | GGCGGCAAAAGACGTTAACGTTCCGGATATCGGCAGCGACGAAG |
| | TTGAAGTGACCGAAATCCTGGTGAAAGTTGGCGATAAAGTTGAA |
| | GCTGAACAGTCGCTGATCACCGTAGAAGGCGACAAGGCTTCTAT |
| | GGAAGTTCCGGCTCCGTTTGCTGGCACCGTGAAAGAGATCAAAG |
| | TGAACGTGGGTGACAAAGTGTCTACCGGCTCGCTGATTATGGTC |
| | TTCGAAGTCGCGGGTGAAGCAGGCGCGGCAGCTCCGGCCGCTAA |
| | ACAGGAAGCAGCTCCGGCAGCGGCCCCTGCACCAGCGGCTGGCG |
| | TGAAAGAAGTTAACGTTCCGGATATCGGCGGTGACGAAGTTGAA |
| | GTGACTGAAGTGATGGTGAAAGTGGGCGACAAAGTTGCCGCTGA |
| | ACAGTCACTGATCACCGTAGAAGGCGACAAAGCTTCTATGGAAG |
| | TTCCGGCGCCGTTTGCAGGCGTCGTGAAGGAACTGAAAGTCAAC |
| | GTTGGCGATAAAGTGAAAACTGGCTCGCTGATTATGATCTTCGA |
| | AGTTGAAGGCGCAGCGCCTGCGGCAGCTCCTGCGAAACAGGAAG |
| | CGGCAGCGCCGGCACCGGCAGCAAAAGCTGAAGCCCCGGCAGCA |
| | GCACCAGCTGCGAAAGCGGAAGGCAAATCTGAATTTGCTGAAAA |
| | CGACGCTTATGTTCACGCGACTCCGCTGATCCGCCGTCTGGCAC |
| | GCGAGTTTGGTGTTAACCTTGCGAAAGTGAAGGGCACTGGCCGT |
| | AAAGGTCGTATCCTGCGCGAAGACGTTCAGGCTTACGTGAAAGA |
| | AGCTATCAAACGTGCAGAAGCAGCTCCGGCAGCGACTGGCGGTG |
| | GTATCCCTGGCATGCTGCCGTGGCCGAAGGTGGACTTCAGCAAG |
| | TTTGGTGAAATCGAAGAAGTGGAACTGGGCCGCATCCAGAAAAT |
| | CTCTGGTGCGAACCTGAGCCGTAACTGGGTAATGATCCCGCATG |
| | TTACTCACTTCGACAAAACCGATATCACCGAGTTGGAAGCGTTC |
| | CGTAAACAGCAGAACGAAGAAGCGGCGAAACGTAAGCTGGATGT |
| | GAAGATCACCCCGGTTGTCTTCATCATGAAAGCCGTTGCTGCAG |
| | CTCTTGAGCAGATGCCTCGCTTCAATAGTTCGCTGTCGGAAGAC |
| | GGTCAGCGTCTGACCCTGAAGAAATACATCAACATCGGTGTGGC |
| | GGTGGATACCCCGAACGGTCTGGTTGTTCCGGTATTCAAAGACG |
| | TCAACAAGAAAGGCATCATCGAGCTGTCTCGCGAGCTGATGACT |
| | ATTTCTAAGAAAGCGCGTGACGGTAAGCTGACTGCGGGCGAAAT |
| | GCAGGGCGGTTGCTTCACCATCTCCAGCATCGGCGGCCTGGGTA |
| | CTACCCACTTCGCGCCGATTGTGAACGCGCCGGAAGTGGCTATC |
| | CTCGGCGTTTCCAAGTCCGCGATGGAGCCGGTGTGGAATGGTAA |
| | AGAGTTCGTGCCGCGTCTGATGCTGCCGATTTCTCTCTCCTTCG |
| | ACCACCGCGTGATCGACGGTGCTGATGGTGCCCGTTTCATTACC |
| | ATCATTAACAACACGCTGTCTGACATTCGCCGTCTGGTGATGTA |
| | A |
| lpd | ATGAGTACTGAAATCAAAACTCAGGTCGTGGTACTTGGGGCAGG |
| SEQ ID NO: 14 | CCCCGCAGGTTACTCCGCTGCCTTCCGTTGCGCTGATTTAGGTC |
| | TGGAAACCGTAATCGTAGAACGTTACAACACCCTTGGCGGTGTT |
| | TGCCTGAACGTCGGCTGTATCCCTTCTAAAGCACTGCTGCACGT |
| | AGCAAAAGTTATCGAAGAAGCCAAAGCGCTGGCTGAACACGGTA |
| | TCGTCTTCGGCGAACCGAAAACCGATATCGACAAGATTCGTACC |
| | TGGAAAGAGAAAGTGATCAATCAGCTGACCGGTGGTCTGGCTGG |
| | TATGGCGAAAGGCCGCAAAGTCAAAGTGGTCAACGGTCTGGGTA |
| | AATTCACCGGGGCTAACACCCTGGAAGTTGAAGGTGAGAACGGC |
| | AAAACCGTGATCAACTTCGACAACGCGATCATTGCAGCGGGTTC |
| | TCGCCCGATCCAACTGCCGTTTATTCCGCATGAAGATCCGCGTA |
| | TCTGGGACTCCACTGACGCGCTGGAACTGAAAGAAGTACCAGAA |
| | CGCCTGCTGGTAATGGGTGGCGGTATCATCGGTCTGGAAATGGG |
| | CACCGTTTACCACGCGCTGGGTTCACAGATTGACGTGGTTGAAA |
| | TGTTCGACCAGGTTATCCCGGCAGCTGACAAAGACATCGTTAAA |
| | GTCTTCACCAAGCGTATCAGCAAGAAATTCAACCTGATGCTGGA |
| | AACCAAAGTTACCGCCGTTGAAGCGAAAGAAGACGGCATTTATG |
| | TGACGATGGAAGGCAAAAAAGCACCCGCTGAACCGCAGCGTTAC |
| | GACGCCGTGCTGGTAGCGATTGGTCGTGTGCCGAACGGTAAAAA |
| | CCTCGACGCAGGCAAAGCAGGCGTGGAAGTTGACGACCGTGGTT |
| | TCATCCGCGTTGACAAACAGCTGCGTACCAACGTACCGCACATC |
| | TTTGCTATCGGCGATATCGTCGGTCAACCGATGCTGGCACACAA |
| | AGGTGTTCACGAAGGTCACGTTGCCGCTGAAGTTATCGCCGGTA |
| | AGAAACACTACTTCGATCCGAAAGTTATCCCGTCCATCGCCTAT |
| | ACCAAACCAGAAGTTGCATGGGTGGGTCTGACTGAGAAAGAAGC |
| | GAAAGAGAAAGGCATCAGCTATGAAACCGCCACCTTCCCGTGGG |
| | CTGCTTCTGGTCGTGCTATCGCTTCCGACTGCGCAGACGGTATG |
| | ACCAAGCTGATTTTCGACAAAGAATCTCACCGTGTGATCGGTGG |
| | TGCGATTGTCGGTACTAACGGCGGCGAGCTGCTGGGTGAAATCG |
| | GCCTGGCAATCGAAATGGGTTGTGATGCTGAAGACATCGCACTG |
| | ACCATCCACGCGCACCCGACTCTGCACGAGTCTGTGGGCCTGGC |
| | GGCAGAAGTGTTCGAAGGTAGCATTACCGACCTGCCGAACCCGA |
| | AAGCGAAGAAGAAGTAA |
| tesB | ATGAGTCAGGCGCTAAAAAATTTACTGACATTGTTAAATCTGGA |
| SEQ ID NO: 15 | AAAAATTGAGGAAGGACTCTTTCGCGGCCAGAGTGAAGATTTAG |
| | GTTTACGCCAGGTGTTTGGCGGCCAGGTCGTGGGTCAGGCCTTG |
| | TATGCTGCAAAAGAGACCGTCCCTGAAGAGCGGCTGGTACATTC |
| | GTTTCACAGCTACTTTCTTCGCCCTGGCGATAGTAAGAAGCCGA |
| | TTATTTATGATGTCGAAACGCTGCGTGACGGTAACAGCTTCAGC |
| | GCCCGCCGGGTTGCTGCTATTCAAAACGGCAAACCGATTTTTTA |
| | TATGACTGCCTCTTTCCAGGCACCAGAAGCGGGTTTCGAACATC |
| | AAAAAACAATGCCGTCCGCGCCAGCGCCTGATGGCCTCCCTTCG |
| | GAAACGCAAATCGCCCAATCGCTGGCGCACCTGCTGCCGCCAGT |
| | GCTGAAAGATAAATTCATCTGCGATCGTCCGCTGGAAGTCCGTC |
| | CGGTGGAGTTTCATAACCCACTGAAAGGTCACGTCGCAGAACCA |
| | CATCGTCAGGTGTGGATCCGCGCAAATGGTAGCGTGCCGGATGA |
| | CCTGCGCGTTCATCAGTATCTGCTCGGTTACGCTTCTGATCTTA |
| | ACTTCCTGCCGGTAGCTCTACAGCCGCACGGCATCGGTTTTCTC |
| | GAACCGGGGATTCAGATTGCCACCATTGACCATTCCATGTGGTT |
| | CCATCGCCCGTTTAATTTGAATGAATGGCTGCTGTATAGCGTGG |
| | AGAGCACCTCGGCGTCCAGCGCACGTGGCTTTGTGCGCGGTGAG |
| | TTTTATACCCAAGACGGCGTACTGGTTGCCTCGACCGTTCAGGA |
| | AGGGGTGATGCGTAATCACAATTAA |
| acuI | ATGCGTGCGGTACTGATCGAGAAGTCCGATGATACACAGTCCGT |
| SEQ ID NO: 16 | CTCTGTCACCGAACTGGCTGAAGATCAACTGCCGGAAGGCGACG |
| | TTTTGGTAGATGTTGCTTATTCAACACTGAACTACAAAGACGCC |
| | CTGGCAATTACCGGTAAAGCCCCCGTCGTTCGTCGTTTTCCGAT |
| | GGTACCTGGAATCGACTTTACGGGTACCGTGGCCCAGTCTTCCC |
| | ACGCCGACTTCAAGCCAGGTGATCGCGTAATCCTGAATGGTTGG |
| | GGTGTGGGGGAAAAACATTGGGGCGGTTTAGCGGAGCGCGCTCG |
| | CGTGCGCGGAGACTGGCTTGTTCCCTTGCCAGCCCCCCTGGACT |
| | TACGCCAAGCGGCCATGATCGGTACAGCAGGATACACGGCGATG |
| | TTGTGCGTTCTGGCGCTTGAACGTCACGGAGTGGTGCCGGGTAA |
| | TGGGGAAATCGTGGTGTCCGGTGCAGCAGGCGGCGTCGGCTCCG |
| | TTGCGACGACCCTTCTTGCCGCTAAGGGCTATGAGGTAGCGGCA |
| | GTGACTGGACGTGCGTCCGAAGCAGAATATCTGCGCGGTTTGGG |
| | GGCGGCGAGCGTAATTGATCGTAACGAATTAACGGGGAAGGTAC |
| | GCCCGCTGGGTCAGGAGCGTTGGGCTGGCGGGATTGACGTGGCG |
| | GGATCAACCGTGCTTGCGAACATGCTTTCTATGATGAAGTATCG |
| | CGGGGTAGTCGCTGCGTGTGGCCTGGCCGCGGGCATGGATCTGC |
| | CCGCGTCTGTCGCGCCCTTTATTCTTCGTGGGATGACGCTGGCA |
| | GGGGTGGATAGCGTTATGTGCCCAAAGACAGATCGTTTAGCAGC |
| | GTGGGCCCGTTTGGCGTCAGATCTTGACCCTGCCAAGCTGGAGG |
| | AGATGACTACAGAGTTGCCGTTTAGTGAAGTAATCGAGACAGCA |
| | CCCAAATTCTTGGACGGGACGGTTCGTGGCCGCATTGTTATCCC |
| | CGTAACGCCCTAA |

TABLE 3
Propionate Cassette Sequences Sleeping Beauty Operon

| | |
|---|---|
| Sbm | ATGTCTAACGTGCAGGAGTGGCAACAGCTTGCCAACAAGGAAT |
| SEQ ID NO: 17 | TGAGCCGTCGGGAGAAAACTGTCGACTCGCTGGTTCATCAAAC |
| | CGCGGAAGGGATCGCCATCAAGCCGCTGTATACCGAAGCCGAT |
| | CTCGATAATCTGGAGGTGACAGGTACCCTTCCTGGTTTGCCGC |
| | CCTACGTTCGTGGCCCGCGTGCCACTATGTATACCGCCCAACC |
| | GTGGACCATCCGTCAGTATGCTGGTTTTTCAACAGCAAAAGAG |
| | TCCAACGCTTTTTATCGCCGTAACCTGGCCGCCGGGCAAAAAG |
| | GTCTTTCCGTTGCGTTTGACCTTGCCACCCACCGTGGCTACGA |
| | CTCCGATAACCCGCGCGTGGCGGGCGACGTCGGCAAAGCGGGC |
| | GTCGCTATCGACACCGTGGAAGATATGAAAGTCCTGTTCGACC |
| | AGATCCCGCTGGATAAAATGTCGGTTTCGATGACCATGAATGG |
| | CGCAGTGCTACCAGTACTGGCGTTTTATATCGTCGCCGCAGAA |
| | GAGCAAGGTGTTACACCTGATAAACTGACCGGCACCATTCAAA |
| | ACGATATTCTCAAAGAGTACCTCTGCCGCAACACCTATATTTA |
| | CCCACCAAAACCGTCAATGCGCATTATCGCCGACATCATCGCC |
| | TGGTGTTCCGGCAACATGCCGCGATTTAATACCATCAGTATCA |
| | GCGGTTACCACATGGGTGAAGCGGGTGCCAACTGCGTGCAGCA |
| | GGTAGCATTTACGCTCGCTGATGGGATTGAGTACATCAAAGCA |
| | GCAATCTCTGCCGGACTGAAAATTGATGACTTCGCTCCTCGCC |
| | TGTCGTTCTTCTTCGGCATCGGCATGGATCTGTTTATGAACGT |
| | CGCCATGTTGCGTGCGGCACGTTATTTATGGAGCGAAGCGGTC |
| | AGTGGATTTGGCGCACAGGACCCGAAATCACTGGCGCTGCGTA |
| | CCCACTGCCAGACCTCAGGCTGGAGCCTGACTGAACAGGATCC |
| | GTATAACAACGTTATCCGCACCACCATTGAAGCGCTGGCTGCG |
| | ACGCTGGGCGGTACTCAGTCACTGCATACCAACGCCTTTGACG |
| | AAGCGCTTGGTTTGCCTACCGATTTCTCAGCACGCATTGCCCG |
| | CAACACCCAGATCATCATCCAGGAAGAATCAGAACTCTGCCGC |
| | ACCGTCGATCCACTGGCCGGATCCTATTACATTGAGTCGCTGA |
| | CCGATCAAATCGTCAAACAAGCCAGAGCTATTATCCAACAGAT |
| | CGACGAAGCCGGTGGCATGGCGAAAGCGATCGAAGCAGGTCTG |
| | CCAAAACGAATGATCGAAGAGGCCTCAGCGCGCGAACAGTCGC |
| | TGATCGACCAGGGCAAGCGTGTCATCGTTGGTGTCAACAAGTA |
| | CAAACTGGATCACGAAGACGAAACCGATGTACTTGAGATCGAC |
| | AACGTGATGGTGCGTAACGAGCAAATTGCTTCGCTGGAACGCA |
| | TTCGCGCCACCCGTGATGATGCCGCCGTAACCGCCGCGTTGAA |
| | CGCCCTGACTCACGCCGCACAGCATAACGAAAACCTGCTGGCT |
| | GCCGCTGTTAATGCCGCTCGCGTTCGCGCCACCCTGGGTGAAA |
| | TTTCCGATGCGCTGGAAGTCGCTTTCGACCGTTATCTGGTGCC |
| | AAGCCAGTGTGTTACCGGCGTGATTGCGCAAAGCTATCATCAG |
| | TCTGAGAAATCGGCCTCCGAGTTCGATGCCATTGTTGCGCAAA |
| | CGGAGCAGTTCCTTGCCGACAATGGTCGTCGCCCGCGCATTCT |
| | GATCGCTAAGATGGGCCAGGATGGACACGATCGCGGCGCGAAA |
| | GTGATCGCCAGCGCCTATTCCGATCTCGGTTTCGACGTAGATT |
| | TAAGCCCGATGTTCTCTACACCTGAAGAGATCGCCCGCCTGGC |
| | CGTAGAAAACGACGTTCACGTAGTGGGCGCATCCTCACTGGCT |
| | GCCGGTCATAAAACGCTGATCCCGGAACTGGTCGAAGCGCTGA |
| | AAAAATGGGGACGCGAAGATATCTGCGTGGTCGCGGGTGGCGT |
| | CATTCCGCCGCAGGATTACGCCTTCCTGCAAGAGCGCGGCGTG |
| | GCGGCGATTTATGGTCCAGGTACACCTATGCTCGACAGTGTGC |
| | GCGACGTACTGAATCTGATAAGCCAGCATCATGATTAA |
| ygfD | ATGATTAATGAAGCCACGCTGGCAGAAAGTATTCGCCGCTTAC |
| SEQ ID NO: 18 | GTCAGGGTGAGCGTGCCACACTCGCCCAGGCCATGACGCTGGT |
| | GGAAAGCCGTCACCCGCGTCATCAGGCACTAAGTACGCAGCTG |
| | CTTGATGCCATTATGCCGTACTGCGGTAACACCCTGCGACTGG |
| | GCGTTACCGGCACCCCCGGCGCGGGGAAAAGTACCTTTCTTGA |
| | GGCCTTTGGCATGTTGTTGATTCGAGAGGGATTAAAGGTCGCG |
| | GTTATTGCGGTCGATCCCAGCAGCCCGGTCACTGGCGGTAGCA |
| | TTCTCGGGGATAAAACCCGCATGAATGACCTGGCGCGTGCCGA |
| | AGCGGCGTTTATTCGCCCGGTACCATCCTCCGGTCATCTGGGC |
| | GGTGCCAGTCAGCGAGCGCGGGAATTAATGCTGTTATGCGAAG |
| | CAGCGGGTTATGACGTAGTGATTGTCGAAACGGTTGGCGTCGG |
| | GCAGTCGGAAACAGAAGTCGCCCGCATGGTGGACTGTTTTATC |
| | TCGTTGCAAATTGCCGGTGGCGGCGATGATCTGCAGGGCATTA |
| | AAAAAGGGCTGATGGAAGTGGCTGATCTGATCGTTATCAACAA |
| | AGACGATGGCGATAACCATACCAATGTCGCCATTGCCCGGCAT |
| | ATGTACGAGAGTGCCCTGCATATTCTGCGACGTAAATACGACG |
| | AATGGCAGCCACGGGTTCTGACTTGTAGCGCACTGGAAAAACG |
| | TGGAATCGATGAGATCTGGCACGCCATCATCGACTTCAAAACC |
| | GCGCTAACTGCCAGTGGTCGTTTACAACAAGTGCGGCAACAAC |
| | AATCGGTGGAATGGCTGCGTAAGCAGACCGAAGAAGAAGTACT |
| | GAATCACCTGTTCGCGAATGAAGATTTCGATCGCTATTACCGC |
| | CAGACGCTTTTAGCGGTCAAAAACAATACGCTCTCACCGCGCA |
| | CCGGCCTGCGGCAGCTCAGTGAATTTATCCAGACGCAATATTT |
| | TGATTAA |
| ygfG | ATGTCTTATCAGTATGTTAACGTTGTCACTATCAACAAAGTGG |
| SEQ ID NO: 19 | CGGTCATTGAGTTTAACTATGGCCGAAAACTTAATGCCTTAAG |
| | TAAAGTCTTTATTGATGATCTTATGCAGGCGTTAAGCGATCTC |
| | AACCGGCCGGAAATTCGCTGTATCATTTTGCGCGCACCGAGTG |
| | GATCCAAAGTCTTCTCCGCAGGTCACGATATTCACGAACTGCC |
| | GTCTGGCGGTCGCGATCCGCTCTCCTATGATGATCCATTGCGT |
| | CAAATCACCCGCATGATCCAAAAATTCCCGAAACCGATCATTT |
| | CGATGGTGGAAGGTAGTGTTTGGGGTGGCGCATTTGAAATGAT |
| | CATGAGTTCCGATCTGATCATCGCCGCCAGTACCTCAACCTTC |
| | TCAATGACGCCTGTAAACCTCGGCGTCCCGTATAACCTGGTCG |
| | GCATTCACAACCTGACCCGCGACGCGGGCTTCCACATTGTCAA |
| | AGAGCTGATTTTTACCGCTTCGCCAATCACCGCCCAGCGCGCG |
| | CTGGCTGTCGGCATCCTCAACCATGTTGTGGAAGTGGAAGAAC |
| | TGGAAGATTTCACCTTACAAATGGCGCACCACATCTCTGAGAA |
| | AGCGCCGTTAGCCATTGCCGTTATCAAAGAAGAGCTGCGTGTA |
| | CTGGGCGAAGCACACACCATGAACTCCGATGAATTTGAACGTA |
| | TTCAGGGGATGCGCCGCGCGGTGTATGACAGCGAAGATTACCA |
| | GGAAGGGATGAACGCTTTCCTCGAAAAACGTAAACCTAATTTC |
| | GTTGGTCATTAA |
| ygfH | ATGGAAACTCAGTGGACAAGGATGACCGCCAATGAAGCGGCAG |
| SEQ ID NO: 20 | AAATTATCCAGCATAACGACATGGTGGCATTTAGCGGCTTTAC |
| | CCCGGCGGGTTCGCCGAAAGCCCTACCCACCGCGATTGCCCGC |
| | AGAGCTAACGAACAGCATGAGGCCAAAAAGCCGTATCAAATTC |
| | GCCTTCTGACGGGTGCGTCAATCAGCGCCGCCGCTGACGATGT |
| | ACTTTCTGACGCCGATGCTGTTTCCTGGCGTGCGCCATATCAA |
| | ACATCGTCCGGTTTACGTAAAAAGATCAATCAGGGCGCGGTGA |
| | GTTTCGTTGACCTGCATTTGAGCGAAGTGGCGCAAATGGTCAA |
| | TTACGGTTTCTTCGGCGACATTGATGTTGCCGTCATTGAAGCA |
| | TCGGCACTGGCACCGGATGGTCGAGTCTGGTTAACCAGCGGGA |
| | TCGGTAATGCGCCGACCTGGCTGCTGCGGGCGAAGAAAGTGAT |
| | CATTGAACTCAATCACTATCACGATCCGCGCGTTGCAGAACTG |
| | GCGGATATTGTGATTCCTGGCGCGCCACCGCGGCGCAATAGCG |
| | TGTCGATCTTCCATGCAATGGATCGCGTCGGTACCCGCTATGT |
| | GCAAATCGATCCGAAAAAGATTGTCGCCGTCGTGGAAACCAAC |
| | TTGCCCGACGCCGGTAATATGCTGGATAAGCAAAATCCCATGT |
| | GCCAGCAGATTGCCGATAACGTGGTCACGTTCTTATTGCAGGA |
| | AATGGCGCATGGGCGTATTCCGCCGGAATTTCTGCCGCTGCAA |
| | AGTGGCGTGGGCAATATCAATAATGCGGTAATGGCGCGTCTGG |
| | GGGAAAACCCGGTAATTCCTCCGTTTATGATGTATTCGGAAGT |
| | GCTACAGGAATCGGTGGTGCATTTACTGGAAACCGGCAAAATC |
| | AGCGGGGCCAGCGCCTCCAGCCTGACAATCTCGGCCGATTCCC |
| | TGCGCAAGATTTACGACAATATGGATTACTTTGCCAGCCGCAT |
| | TGTGTTGCGTCCGCAGGAGATTTCCAATAACCCGGAAATCATC |
| | CGTCGTCTGGGCGTCATCGCTCTGAACGTCGGCCTGGAGTTTG |
| | ATATTTACGGGCATGCCAACTCAACACACGTAGCCGGGGTCGA |
| | TCTGATGAACGGCATCGGCGGCAGCGGTGATTTTGAACGCAAC |
| | GCGTATCTGTCGATCTTTATGGCCCCGTCGATTGCTAAAGAAG |
| | GCAAGATCTCAACCGTCGTGCCAATGTGCAGCCATGTTGATCA |
| | CAGCGAACACAGCGTCAAAGTGATCATCACCGAACAAGGGATC |
| | GCCGATCTGCGCGGTCTTTCCCCGCTTCAACGCGCCCGCACTA |
| | TCATTGATAATTGTGCACATCCTATGTATCGGGATTATCTGCA |
| | TCGCTATCTGGAAAATGCGCCTGGCGGACATATTCACCACGAT |
| | CTTAGCCACGTCTTCGACTTACACCGTAATTTAATTGCAACCG |
| | GCTCGATGCTGGGTTAA |

TABLE 4
Sequences of Propionate Cassette from Propioni Bacteria

| Description | Sequence |
|---|---|
| mutA | ATGAGCAGCACGGATCAGGGGACCAACCCCGCCGACACTGACG |
| SEQ ID NO: 21 | ACCTCACTCCCACCACACTCAGTCTGGCCGGGGATTTCCCCAA |
| | GGCCACTGAGGAGCAGTGGGAGCGCGAAGTTGAGAAGGTATTC |
| | AACCGTGGTCGTCCACCGGAGAAGCAGCTGACCTTCGCCGAGT |
| | GTCTGAAGCGCCTGACGGTTCACACCGTCGATGGCATCGACAT |
| | CGTGCCGATGTACCGTCCGAAGGACGCGCCGAAGAAGCTGGGT |
| | TACCCCGGCGTCACCCCCTTCACCCGCGGCACCACGGTGCGCA |
| | ACGGTGACATGGATGCCTGGGACGTGCGCGCCCTGCACGAGGA |
| | TCCCGACGAGAAGTTCACCCGCAAGGCGATCCTTGAAGACCTG |
| | GAGCGTGGCGTCACCTCCCTGTTGTTGCGCGTTGATCCCGACG |
| | CGATCGCACCCGAGCACCTCGACGAGGTCCTCTCCGACGTCCT |
| | GCTGGAAATGACCAAGGTGGAGGTCTTCAGCCGCTACGACCAG |
| | GGTGCCGCCGCCGAGGCCTTGATGGGCGTCTACGAGCGCTCCG |
| | ACAAGCCGGCGAAGGACCTGGCCCTGAACCTGGGCCTGGATCC |
| | CATCGGCTTCGCGGCCCTGCAGGGCACCGAGCCGGATCTGACC |
| | GTGCTCGGTGACTGGGTGCGCCGCCTGGCGAAGTTCTCACCGG |
| | ACTCGCGCGCCGTCACGATCGACGCGAACGTCTACCACAACGC |
| | CGGTGCCGGCGACGTGGCAGAGCTCGCTTGGGCACTGGCCACC |
| | GGCGCGGAGTACGTGCGCGCCCTGGTCGAACAGGGCTTCAACG |
| | CCACAGAGGCCTTCGACACGATCAACTTCCGTGTCACCGCCAC |
| | CCACGACCAGTTCCTCACGATCGCCCGTCTTCGCGCCCTGCGC |
| | GAGGCATGGGCCCGCATCGGCGAGGTCTTTGGCGTGGACGAGG |
| | ACAAGCGCGGCGCTCGCCAGAATGCGATCACCAGTTGGCGTGA |
| | GCTCACCCGCGAAGACCCCTATGTCAACATCCTTCGCGGTTCG |
| | ATTGCCACCTTCTCCGCCTCCGTTGGCGGGGCCGAGTCGATCA |
| | CGACGCTGCCCTTCACCCAGGCCCTCGGCCTGCCGGAGGACGA |
| | CTTCCCGCTGCGCATCGCGCGCAACACGGGCATCGTGCTCGCC |
| | GAAGAGGTGAACATCGGCCGCGTCAACGACCCGGCCGGTGGCT |
| | CCTACTACGTCGAGTCGCTCACTCGCACCCTGGCCGACGCTGC |
| | CTGGAAGGAATTCCAGGAGGTCGAGAAGCTCGGTGGCATGTCG |
| | AAGGCGGTCATGACCGAGCACGTCACCAAGGTGCTCGACGCCT |
| | GCAATGCCGAGCGCGCCAAGCGCCTGGCCAACCGCAAGCAGCC |
| | GATCACCGCGGTCAGCGAGTTCCCGATGATCGGGGCCCGCAGC |
| | ATCGAGACCAAGCCGTTCCCAACCGCTCCGGCGCGCAAGGGCC |
| | TGGCCTGGCATCGCGATTCCGAGGTGTTCGAGCAGCTGATGGA |
| | TCGCTCCACCAGCGTCTCCGAGCGCCCCAAGGTGTTCCTTGCC |
| | TGCCTGGGCACCCGTCGCGACTTCGGTGGCCGCGAGGGCTTCT |
| | CCAGCCCGGTATGGCACATCGCCGGTATCGACACCCCGCAGGT |
| | CGAAGGCGGCACCACCGCCGAGATCGTCGAGGCGTTCAAGAAG |
| | TCGGGCGCCCAGGTGGCCGATCTCTGCTCGTCCGCCAAGATCT |
| | ACGCGCAGCAGGGACTTGAGGTTGCCAAGGCGCTCAAGGCCGC |
| | CGGCGCGAAGGCCCTGTATCTGTCGGGCGCCTTCAAGGAGTTC |
| | GGCGATGACGCCGCCGAGGCCGAGAAGCTGATCGACGGACGCC |
| | TGTACATGGGCATGGATGTCGTCGACACCCTGTCCTCCACCCT |
| | TGATATCTTGGGAGTCGCGAAGTGA |
| mutB | GTGAGCACTCTGCCCCGTTTTGATTCAGTTGACCTGGGCAATG |
| SEQ ID NO: 22 | CCCCGGTTCCTGCTGATGCCGCACAGCGCTTCGAGGAGTTGGC |
| | CGCCAAGGCCGGCACCGAAGAGGCGTGGGAGACGGCTGAGCAG |
| | ATTCCGGTTGGCACCCTGTTCAACGAAGACGTCTACAAGGACA |
| | TGGACTGGCTGGACACCTACGCCGGTATCCCGCCGTTCGTCCA |
| | CGGCCCATATGCAACCATGTACGCGTTCCGTCCCTGGACGATT |
| | CGCCAGTACGCCGGCTTCTCCACGGCCAAGGAGTCCAACGCCT |
| | TCTACCGCCGCAACCTTGCGGCGGGCCAGAAGGGCCTGTCGGT |
| | TGCCTTCGACCTGCCCACCCACCGCGGCTACGACTCGGACAAT |
| | CCCCGCGTCGCCGGTGACGTCGGCATGGCCGGGGTGGCCATCG |
| | ACTCCATCTATGACATGCGCGAGCTGTTCGCCGGCATTCCGCT |
| | GGACCAGATGAGCGTGTCGATGACCATGAACGGCGCCGTGCTG |
| | CCGATCCTGGCCCTCTATGTGGTGACCGCCGAGGAGCAGGGCG |
| | TCAAGCCCGAGCAGCTCGCCGGGACGATCCAGAACGACATCCT |
| | CAAGGAGTTCATGGTTCGTAACACCTATATCTACCCGCCGCAG |
| | CCGAGTATGCGAATCATCTCCGAGATCTTCGCCTACACGAGTG |
| | CCAATATGCCGAAGTGGAATTCGATTTCCATTTCCGGCTACCA |
| | CATGCAGGAAGCCGGCGCCACGGCCGACATCGAGATGGCCTAC |
| | ACCCTGGCCGACGGTGTCGACTACATCCGCGCCGGCGAGTCGG |
| | TGGGCCTCAATGTCGACCAGTTCGCGCCGCGTCTGTCCTTCTT |
| | CTGGGGCATCGGCATGAACTTCTTCATGGAGGTTGCCAAGCTG |
| | CGTGCCGCACGTATGTTGTGGGCCAAGCTGGTGCATCAGTTCG |
| | GGCCGAAGAATCCGAAGTCGATGAGCCTGCGCACCCACTCGCA |
| | GACCTCCGGTTGGTCGCTGACCGCCCAGGACGTCTACAACAAC |
| | GTCGTGCGTACCTGCATCGAGGCCATGGCCGCCACCCAGGGCC |
| | ATACCCAGTCGCTGCACACGAACTCGCTCGACGAGGCCATTGC |
| | CCTACCGACCGATTTCAGCGCCCGCATCGCCCGTAACACCCAG |
| | CTGTTCCTGCAGCAGGAATCGGGCACGACGCGCGTGATCGACC |
| | CGTGGAGCGGCTCGGCATACGTCGAGGAGCTCACCTGGGACCT |
| | GGCCCGCAAGGCATGGGGCCACATCCAGGAGGTCGAGAAGGTC |
| | GGCGGCATGGCCAAGGCCATCGAAAAGGGCATCCCCAAGATGC |
| | GCATTGAGGAAGCCGCCGCCCGCACCCAGGCACGCATCGACTC |
| | CGGCCGTCAGCCGCTGATCGGCGTGAACAAGTACCGCCTGGAG |
| | CACGAGCCGCCGCTCGATGTGCTCAAGGTTGACAACTCCACGG |
| | TGCTCGCCGAGCAGAAGGCCAAGCTGGTCAAGCTGCGCGCCGA |
| | GCGCGATCCCGAGAAGGTCAAGGCCGCCCTCGACAAGATCACC |
| | TGGGCTGCCGCCAACCCCGACGACAAGGATCCGGATCGCAACC |
| | TGCTGAAGCTGTGCATCGACGCTGGCCGCGCCATGGCGACGGT |
| | CGGCGAGATGAGCGACGCGCTCGAGAAGGTCTTCGGACGCTAC |
| | ACCGCCCAGATTCGCACCATCTCCGGTGTGTACTCGAAGGAAG |
| | TGAAGAACACGCCTGAGGTTGAGGAAGCACGCGAGCTCGTTGA |
| | GGAATTCGAGCAGGCCGAGGGCCGTCGTCCTCGCATCCTGCTG |
| | GCCAAGATGGGCCAGGACGGTCACGACCGTGGCCAGAAGGTCA |
| | TCGCCACCGCCTATGCCGACCTCGGTTTCGACGTCGACGTGGG |
| | CCCGCTGTTCCAGACCCCGGAGGAGACCGCACGTCAGGCCGTC |
| | GAGGCCGATGTGCACGTGGTGGGCGTTTCGTCGCTCGCCGGCG |
| | GGCATCTGACGCTGGTTCCGGCCCTGCGCAAGGAGCTGGACAA |
| | GCTCGGACGTCCCGACATCCTCATCACCGTGGGCGGCGTGATC |
| | CCTGAGCAGGACTTCGACGAGCTGCGTAAGGACGGCGCCGTGG |
| | AGATCTACACCCCCGGCACCGTCATTCCGGAGTCGGCGATCTC |
| | GCTGGTCAAGAAACTGCGGGCTTCGCTCGATGCCTAG |
| GI:18042134 | ATGAGTAATGAGGATCTTTTCATCTGTATCGATCACGTGGCAT |
| SEQ ID NO: 23 | ATGCGTGCCCCGACGCCGACGAGGCTTCCAAGTACTACCAGGA |
| | GACCTTCGGCTGGCATGAGCTCCACCGCGAGGAGAACCCGGAG |
| | CAGGGAGTCGTCGAGATCATGATGGCCCCGGCTGCGAAGCTGA |
| | CCGAGCACATGACCCAGGTTCAGGTCATGGCCCCGCTCAACGA |
| | CGAGTCGACCGTTGCCAAGTGGCTTGCCAAGCACAATGGTCGC |
| | GCCGGACTGCACCACATGGCATGGCGTGTCGATGACATCGACG |
| | CCGTCAGCGCCACCCTGCGCGAGCGCGGCGTGCAGCTGCTGTA |
| | TGACGAGCCCAAGCTCGGCACCGGCGGCAACCGCATCAACTTC |
| | ATGCATCCCAAGTCGGGCAAGGGCGTGCTCATCGAGCTCACCC |
| | AGTACCCGAAGAACTGA |
| mmdA | ATGGCTGAAAACAACAATTTGAAGCTCGCCAGCACCATGGAAG |
| SEQ ID NO: 24 | GTCGCGTGGAGCAGCTCGCAGAGCAGCGCCAGGTGATCGAAGC |
| | CGGTGGCGGCGAACGTCGCGTCGAGAAGCAACATTCCCAGGGT |
| | AAGCAGACCGCTCGTGAGCGCCTGAACAACCTGCTCGATCCCC |
| | ATTCGTTCGACGAGGTCGGCGCTTTCCGCAAGCACCGCACCAC |
| | GTTGTTCGGCATGGACAAGGCCGTCGTCCCGGCAGATGGCGTG |
| | GTCACCGGCCGTGGCACCATCCTTGGTCGTCCCGTGCACGCCG |
| | CGTCCCAGGACTTCACGGTCATGGGTGGTTCGGCTGGCGAGAC |
| | GCAGTCCACGAAGGTCGTCGAGACGATGGAACAGGCGCTGCTC |
| | ACCGGCACGCCCTTCCTGTTCTTCTACGATTCGGGCGGCGCCC |
| | GGATCCAGGAGGGCATCGACTCGCTGAGCGGTTACGGCAAGAT |
| | GTTCTTCGCCAACGTGAAGCTGTCGGGCGTCGTGCCGCAGATC |
| | GCCATCATTGCCGGCCCCTGTGCCGGTGGCGCCTCGTATTCGC |
| | CGGCACTGACTGACTTCATCATCATGACCAAGAAGGCCCATAT |
| | GTTCATCACGGGCCCCCAGGTCATCAAGTCGGTCACCGGCGAG |
| | GATGTCACCGCTGACGAACTCGGTGGCGCTGAGGCCCATATGG |
| | CCATCTCGGGCAATATCCACTTCGTGGCCGAGGACGACGACGC |
| | CGCGGAGCTCATTGCCAAGAAGCTGCTGAGCTTCCTTCCGCAG |
| | AACAACACTGAGGAAGCATCCTTCGTCAACCCGAACAATGACG |
| | TCAGCCCCAATACCGAGCTGCGCGACATCGTTCCGATTGACGG |
| | CAAGAAGGGCTATGACGTGCGCGATGTCATTGCCAAGATCGTC |
| | GACTGGGGTGACTACCTCGAGGTCAAGGCCGGCTATGCCACCA |
| | ACCTCGTGACCGCCTTCGCCCGGGTCAATGGTCGTTCGGTGGG |
| | CATCGTGGCCAATCAGCCGTCGGTGATGTCGGGTTGCCTCGAC |
| | ATCAACGCCTCTGACAAGGCCGCCGAATTCGTGAATTTCTGCG |
| | ATTCGTTCAACATCCCGCTGGTGCAGCTGGTCGACGTGCCGGG |
| | CTTCCTGCCCGGCGTGCAGCAGGAGTACGGCGGCATCATTCGC |
| | CATGGCGCGAAGATGCTGTACGCCTACTCCGAGGCCACCGTGC |
| | CGAAGATCACCGTGGTGCTCCGCAAGGCCTACGGCGGCTCCTA |
| | CCTGGCCATGTGCAACCGTGACCTTGGTGCCGACGCCGTGTAC |
| | GCCTGGCCCAGCGCCGAGATTGCGGTGATGGGCGCCGAGGGTG |
| | CGGCAAATGTGATCTTCCGCAAGGAGATCAAGGCTGCCGACGA |
| | TCCCGACGCCATGCGCGCCGAGAAGATCGAGGAGTACCAGAAC |
| | GCGTTCAACACGCCGTACGTGGCCGCCGCCCGCGGTCAGGTCG |
| | ACGACGTGATTGACCCGGCTGATACCCGTCGAAAGATTGCTTC |
| | CGCCCTGGAGATGTACGCCACCAAGCGTCAGACCCGCCCGGCG |
| | AAGAAGCATGGAAACTTCCCCTGCTGA |
| PFREUD_18870 | ATGAGTCCGCGAGAAATTGAGGTTTCCGAGCCGCGCGAGGTTG |
| SEQ ID NO: 25 | GTATCACCGAGCTCGTGCTGCGCGATGCCCATCAGAGCCTGAT |
| | GGCCACACGAATGGCAATGGAAGACATGGTCGGCGCCTGTGCA |
| | GACATTGATGCTGCCGGGTACTGGTCAGTGGAGTGTTGGGGTG |
| | GTGCCACGTATGACTCGTGTATCCGCTTCCTCAACGAGGATCC |
| | TTGGGAGCGTCTGCGCACGTTCCGCAAGCTGATGCCCAACAGC |
| | CGTCTCCAGATGCTGCTGCGTGGCCAGAACCTGCTGGGTTACC |
| | GCCACTACAACGACGAGGTCGTCGATCGCTTCGTCGACAAGTC |
| | CGCTGAGAACGGCATGGACGTGTTCCGTGTCTTCGACGCCATG |
| | AATGATCCCCGCAACATGGCGCACGCCATGGCTGCCGTCAAGA |
| | AGGCCGGCAAGCACGCGCAGGGCACCATTTGCTACACGATCAG |
| | CCCGGTCCACACCGTTGAGGGCTATGTCAAGCTTGCTGGTCAG |
| | CTGCTCGACATGGGTGCTGATTCCATCGCCCTGAAGGACATGG |
| | CCGCCCTGCTCAAGCCGCAGCCGGCCTACGACATCATCAAGGC |
| | CATCAAGGACACCTACGGCCAGAAGACGCAGATCAACCTGCAC |
| | TGCCACTCCACCACGGGTGTCACCGAGGTCTCCCTCATGAAGG |
| | CCATCGAGGCCGGCGTCGACGTCGTCGACACCGCCATCTCGTC |
| | CATGTCGCTCGGCCCGGGCCACAACCCCACCGAGTCGGTTGCC |
| | GAGATGCTCGAGGGCACCGGGTACACCACCAACCTTGACTACG |
| | ATCGCCTGCACAAGATCCGCGATCACTTCAAGGCCATCCGCCC |
| | GAAGTACAAGAAGTTCGAGTCGAAGACGCTTGTCGACACCTCG |
| | ATCTTCAAGTCGCAGATCCCCGGCGGCATGCTCTCCAACATGG |
| | AGTCGCAGCTGCGCGCCCAGGGCGCCGAGGACAAGATGGACGA |
| | GGTCATGGCAGAGGTGCCGCGCGTCCGCAAGGCCGCCGGCTTC |
| | CCGCCCCTGGTCACCCCGTCCAGCCAGATCGTCGGCACGCAGG |
| | CCGTGTTCAACGTGATGATGGGCGAGTACAAGAGGATGACCGG |
| | CGAGTTCGCCGACATCATGCTCGGCTACTACGGCGCCAGCCCG |
| | GCCGATCGCGATCCGAAGGTGGTCAAGTTGGCCGAGGAGCAGT |
| | CCGGCAAGAAGCCGATCACCCAGCGCCCGGCCGATCTGCTGCC |
| | CCCCGAGTGGGAGGAGCAGTCCAAGGAGGCCGCGGCCCTCAAG |
| | GGCTTCAACGGCACCGACGAGGACGTGCTCACCTATGCACTGT |
| | TCCCGCAGGTCGCTCCGGTCTTCTTCGAGCATCGCGCCGAGGG |
| | CCCGCACAGCGTGGCTCTCACCGATGCCCAGCTGAAGGCCGAG |
| | GCCGAGGGCGACGAGAAGTCGCTCGCCGTGGCCGGTCCCGTCA |
| | CCTACAACGTGAACGTGGGCGGAACCGTCCGCGAAGTCACCGT |
| | TCAGCAGGCGTGA |
| Bccp | ATGAAACTGAAGGTAACAGTCAACGGCACTGCGTATGACGTTG |
| SEQ ID NO: 26 | ACGTTGACGTCGACAAGTCACACGAAAACCCGATGGGCACCAT |
| | CCTGTTCGGCGGCGGCACCGGCGGCGCGCCGGCACCGCGCGCA |
| | GCAGGTGGCGCAGGCGCCGGTAAGGCCGGAGAGGGCGAGATTC |
| | CCGCTCCGCTGGCCGGCACCGTCTCCAAGATCCTCGTGAAGGA |
| | GGGTGACACGGTCAAGGCTGGTCAGACCGTGCTCGTTCTCGAG |
| | GCCATGAAGATGGAGACCGAGATCAACGCTCCCACCGACGGCA |
| | AGGTCGAGAAGGTCCTTGTCAAGGAGCGTGACGCCGTGCAGGG |
| | CGGTCAGGGTCTCATCAAGATCGGCTGA |

[0259] In some embodiments, the genetically engineered bacteria comprise one or more nucleic acid sequence(s) of Table 4 (SEQ ID NO: 21-SEQ ID NO: 26) or a functional fragment thereof. In some embodiments, the genetically engineered bacteria comprise a nucleic acid sequence that, but for the redundancy of the genetic code, encodes the same polypeptide as one or more nucleic acid s sequence(s) of Table 4 (SEQ ID NO: 21-SEQ ID NO: 26) or a functional fragment thereof. In some embodiments, genetically engineered bacteria comprise a nucleic acid sequence that is at least about 80%, at least about 85%, at least about 90%, at least about 95%, or at least about 99% homologous to the DNA sequence of one or more nucleic acid sequence(s) of Table 4 (SEQ ID NO: 21-SEQ ID NO: 26) or a functional fragment thereof, or a nucleic acid sequence that, but for the redundancy of the genetic code, encodes the same polypeptide as one or more nucleic acid sequence(s) of Table 4 (SEQ ID NO: 21-SEQ ID NO: 26) or a functional fragment thereof.

[0260] Table 5 lists exemplary polypeptide sequences, which may be encoded by the propionate production gene(s) or cattette(s) of the genetically engineered bacteria.

TABLE 5
Polypeptide Sequences for Propionate Synthesis

| | |
|---|---|
| Pct | MRKVPIITADEAAKLIKDGDTVTTSGFVGNAIPEALDRAVEKRFLET |
| SEQ ID | GEPKNITYVYCGSQGNRDGRGAEHFAHEGLLKRYIAGHWATVPALGK |
| NO: 27 | MAMENKMEAYNVSQGALCHLFRDTASHKPGVFTKVGIGTFIDPRNGG |
| | GKVNDITKEDIVELVEIKGQEYLFYPAFPIHVALIRGTYADESGNIT |
| | FEKEVAPLEGTSVCQAVKNSGGIVVVQVERVVKAGTLDPRHVKVPGI |
| | YVDYVVVADPEDHQQSLDCEYDPALSGEHRRPEVVGEPLPLSAKKVI |
| | GRRGAIELEKDVAVNLGVGAPEYVASVADEEGIVDFMTLTAESGAIG |
| | GVPAGGVRFGASYMADALIDQGYQFDYYDGGGLDLCYLGLAECDEKG |
| | NINVSRFGPRIAGCGGFINITQNTPKVFFCGTFTAGGLKVKIEDGKV |
| | IIVQEGKQKKFLKAVEQITFMGDVALANKQQVTYITERCVFLLKEDG |
| | LHLSEIAPGIDLQTQILDVMDFAPIIDRDANGQIKLMDAALFAEGLM |
| | GLKEMKS* |
| lcdA | MSLTQGMKAKQLLAYFQGKADQDAREAKARGELVCWSASVAPPEFCV |
| SEQ ID | TMGIAMIYPETHAAGIGARKGAMDMLEVADRKGYNVDCCSYGRVNMG |
| NO: 28 | YMECLKEAAITGVKPEVLVNSPAADVPLPDLVITCNNICNTLLKWYE |
| | NLAAELDIPCIVIDVPFNHTMPIPEYAKAYIADQFRNAISQLEVICG |
| | RPFDWKKFKEVKDQTQRSVYHWNRIAEMAKYKPSPLNGFDLFNYMAL |
| | IVACRSLDYAEITFKAFADELEENLKAGIYAFKGAEKTRFQWEGIAV |
| | WPHLGHTFKSMKNLNSIMTGTAYPALWDLHYDANDESMHSMAEAYTR |
| | IYINTCLQNKVEVLLGIMEKGQVDGTVYHLNRSCKLMSFLNVETAEI |
| | IKEKNGLPYVSIDGDQTDPRVFSPAQFDTRVQALVEMMEANMAAAE* |
| lcdB | MSRVEAILSQLKDVAANPKKAMDDYKAETGKGAVGIMPIYSPEEMVH |
| SEQ ID | AAGYLPMGIWGAQGKTISKARTYLPAFACSVMQQVMELQCEGAYDDL |
| NO: 29 | SAVIFSVPCDTLKCLSQKWKGTSPVIVFTHPQNRGLEAANQFLVTEY |
| | ELVKAQLESVLGVKISNAALENSIAIYNENRAVMREFVKVAADYPQV |
| | IDAVSRHAVFKARQFMLKEKHTALVKELIAEIKATPVQPWDGKKVVV |
| | TGILLEPNELLDIFNEFKIAIVDDDLAQESRQIRVDVLDGEGGPLYR |
| | MAKAWQQMYGCSLATDTKKGRGRMLINKTIQTGADAIVVAMMKFCDP |
| | EEWDYPVMYREFEEKGVKSLMIEVDQEVSSFEQIKTRLQSFVEML* |
| lcdC | MYTLGIDVGSASSKAVILKDGKDIVAAEVVQVGTGSSGPQRALDKAFE |
| SEQ ID | VSGLKKEDISYTVATGYGRFNFSDADKQISEISCHAKGIYFLVPTART |
| NO: 30 | IIDIGGQDAKAIRLDDKGGIKQFFMNDKCAAGTGRFLEVMARVLETTL |
| | DEMAELDEQATDTAPISSTCTVFAESEVISQLSNGVSRNNIIKGVHLS |
| | VASRACGLAYRGGLEKDVVMTGGVAKKAGVVRAVAGVLKTDVIVAPNP |
| | QTTGALGAALYAYEAAQKKX |
| etfA | MAFNSAD1NSFRDIWVFCEQREGKLINTDFELISEGRKLADERGSKL |
| SEQ ID | VGILLGHEVEEIAKELGGYGADKVIVCDHPELKFYTTDAYAKVLCDV |
| NO: 31 | VMEEKPEVILIGATNIGRDLGPRCAARLHTGLTADCTHLDIDHNKYV |
| | DFLSTSSTLDISSMTFPMEDTNLKMTRPAFGGHLMATIICPRFRPCM |
| | STVRPGVMKKAEFSQEMAQACQVVTRHVNLSDEDLKTKVINIVKETK |
| | KIVDLIGAEIIVSVGRGISKDVQGGIALAEKLADAFGNGVVGGSRAV |
| | IDSGWLPADHQVGQTGKTVHPKVYVALGISGAIQHKAGMQDSELIIA |
| | VNKDETAPIFDCADYGITGDLFKIVPMMIDAIKEGKMA* |
| acrB | MRIYVCVKQVPDTSGKVAVHPDGTLNRASMAAIINPDDMSAIEQALK |
| SEQ ID | LKDETGCQVTALTMGPPPAEGMLREIIAMGADDGVLISAREFGGSDT |
| NO: 32 | FATSQIISAAIHKLGLSNEDMIFCGRQAIDGDTAQVGPQIAEKLSIP |
| | QVTYGAGIKKSGDLVLVKRMLEDGYMMIEVETPCLITCIQDKAVKPR |
| | YMTLNGIMECYSKPLLVLDYEALKDEPLIELDTIGLKGSPTNIFKSF |
| | TPPQKGVGVMLQGTDKEKVEDLVDKLMQKHVI* |
| acrC | MFLLKTKKERMKRMDFSLTREQEMLKKLARQFAEIELEPVAEEIDRE |
| SEQ ID | HVFPAENFKKMAEIGLTGIGIPKEFGGSGGGTLEKVIAVSEFGKKCM |
| NO: 33 | ASASILSIHLIAPQAIYKYGTKEQKETYLPRLTKGGELGAFALTEPN |
| | AGSDAGAVKTTAILDSQTNEYVLNGTKCFISGGGRAGVLVIFALTEP |
| | KKGLKGMSAIIVEKGTPGFSIGKVESKMGIAGSETAELIFEDCRVPA |
| | ANLLGKEGKGFKIAMEALDGARIGVGAQAIGIAEGAIDLSVKYVHER |
| | IQFGKPIANLQGIQWYIADMATKTAAARALVEFAAYLEDAGKPFTKE |
| | SAMCKLNASENARFVTNLALQIHGGYGYMKDYPLERMYRDAKITEIY |
| | EGTSEIHKWAREVMKR* |
| thrAfbr | MRVLKFGGTSVANAERFLRVADILESKARQGQVATVLSAPAKITNHL |
| SEQ ID | VAMIEKTISGQDALPNISDAERIFAELLTGLAAAQPGFPLAQLKIFV |
| NO: 34 | DQEFAQIKHVLHGISLLGQCPDSINAALICRGEKMSIAIMAGVLEAR |
| | GHMVTVIDPVEKLLAVGHYLESTVDIAESTRRIAASRIFADHMVLMA |
| | GFTAGNEKGELVVLGRNGSDYSAAVLAACLRADCCEIWTDVDGVYTC |
| | DPRQVPDARLLKSMSYQEAMELSYFGAKVLHPRTITPIAQFQIPCLI |
| | KNTGNPQAPGTLIGASRDEDELPVKGISNLNNMAMFSVSGPGMKGMV |
| | GMAARVFAAMSRARISVVLITQSSSEYSISFCVPQSDCVRAERAMQE |
| | EFYLELKEGLLEPLAVTERLAIISSSGDGMRTLRGISAKFFAALARA |
| | NINIVAIAQRSSERSISSSVNNDDATTGVRVTHQMLFNTDQVIEVFV |
| | IGVGGVGGALLEQLKRQQSWLKNKHIDLRVCGVANSKALLTNVHGLN |
| | LENWQEELAQAKEPFNLGRLIRLVKEYHLLNPVIVDCTSSQAVADQY |
| | ADFLREGFHSSTPNKKANTSSMDYYHQLRYAAEKSRRKFLYDTNVGA |
| | GLPVIENLQNLLNAGDELMKFSGILSGSLSYIFGKLDEGMSFSEATT |
| | LAREMGYTEPDPRDDLSGMDVARKLLILARETGRELELADIEIEPVL |
| | PAEFNAEGDVAAFMANLSQLDDLFAARVAKARDEGKVLRYVGNIDED |
| | GVCRVKIAEVDGNDPLFKVKNGENALAFYSHYYQPLPLVLRGYGAGN |
| | DVTAAGVFADLLRTLSWKLGV* |
| thrB | MVKVYAPASSANMSVGFDVLGAAVTPVDGALLGDVVTVEAAETFSLN |
| SEQ ID | NLGRFADKLPSEPRENIVYQCWERFCQELGKQIPVAMTLEKNMPIGS |
| NO: 35 | GLGSSACSVVAALMAMNEHCGKPLNDTRLLALMGELEGRISGSIHYD |
| | NVAPCFLGGMQLMIEENDIISQQVPGFDEWLWVLAYPGIKVSTAEAR |
| | AILPAQYRRQDCIAHGRHLAGFIHACYSRQPELAAKLMKDVIAEPYR |
| | ERLLPGFRQARQAVAEIGAVASGISGSGPTLFALCDKPETAQRVADW |
| | LGKNYLQNQEGFVHICRLDTAGARVLEM* |
| thrC | MKLYNLKDHNEQVSFAQAVTQGLGKNQGLFFPHDLPEFSLTEIDEML |
| SEQ ID | KLDFVTRSAKILSAFIGDEIPQEILEERVRAAFAFPAPVANVESDVG |
| NO: 36 | CLELFHGPTLAFKDFGGRFMAQMLTHIAGDKPVTILTATSGDTGAAV |
| | AHAFYGLPNVKVVILYPRGKISPLQEKLFCTLGGNIETVAIDGDFDA |
| | CQALVKQAFDDEELKVALGLNSANSINISRLLAQICYYFEAVAQLPQ |
| | ETRNQLVVSVPSGNFGDLTAGLLAKSLGLPVKRFIAATNVNDTVPRF |
| | LHDGQWSPKATQATLSNAMDVSQPNNWPRVEELFRRKIWQLKELGYA |
| | AVDDETTQQTMRELKELGYTSEPHAAVAYRALRDQLNPGEYGLFLGT |
| | AHPAKFKESVEAILGETLDLPKELAERADLPLLSHNLPADFAALRKL |
| | MMNHQ* |
| ilvA^{fbr} | MSETYVSEKSPGVMASGAELIRAADIQTAQARISSVIAPTPLQYCPR |
| SEQ ID | LSEETGAEIYLKREDLQDVRSYKIRGALNSGAQLTQEQRDAGIVAAS |
| NO: 37 | AGNHAQGVAYVCKSLGVQGRIYVPVQTPKQKRDRIMVHGGEFVSLVV |
| | TGNNFDEASAAAHEDAERTGATLIEPFDARNTVIGQGTVAAEILSQL |
| | TSMGKSADHVMVPVGGGGLLAGVVSYMADMAPRTAIVGIEPAGAASM |
| | QAALRNGGPITLETVDPFVDGAAVKRVGDLNYTIVEKNQGRVHMMSA |
| | TEGAVCTEMLDLYQNEGIIAEPAGALSIAGLKEMSFAPGSAVVCIIS |
| | GGNNDVLRYAEIAERSLVHRGLKHYFLVNFPQKPGQLRHFLEDILGP |
| | DDDITLFEYLKRNNRETGTALVGIHLSEASGLDSLLERMEESAIDSR |
| | RLEPGTPEYEYLT* |
| ace | MSERFPNDVDPIETRDWLQAIESVIREEGVERAQYLIDQLLAEARKG |
| SEQ ID | GVNVAAGTG1SNYINTIPVEEQPEYPGNLELERRIRSAIRWNAIMTV |
| NO: 38 | LRASKKDLELGGHMASFQSSATIYDVCFNHFFRARNEQDGGDLVYFQ |
| | GHISPGVYARAFLEGRLTQEQLDNFRQEVHGNGLSSYPHPKLMPEFW |
| | QFPTVSMGLGPIGAIYQAKFLKYLEHRGLKDTSKQTVYAFLGDGEMD |
| | EPESKGAITIATREKLDNLVFVINCNLQRLDGPVTGNGKIINELEGI |
| | FEGAGWNVIKVMWGSRWDELLRKDTSGKLIQLMNETVDGDYQTFKSK |
| | DGAYVREHFFGKYPETAALVADWTDEQIWALNRGGHDPKKIYAAFKK |
| | AQETKGKATVILAHTIKGYGMGDAAEGKNIAHQVKKMNMDGVRHIRD |
| | RFNVPVSDADIEKLPYITFPEGSEEHTYLHAQRQKLHGYLPSRQPNF |
| | TEKLELPSLQDFGALLEEQSKEISTTIAFVRALNVMLKNKSIKDRLV |
| | PIIADEARTFGMEGLFRQIGIYSPNGQQYTPQDREQVAYYKEDEKGQ |
| | ILQEGINELGAGCSWLAAATSYSTNNLPMIPFYIYYSMFGFQRIGDL |
| | CWAAGDQQARGFLIGGTSGRTTLNGEGLQHEDGHSHIQSLTIPNCIS |
| | YDPAYAYEVAVIMHDGLERMYGEKQENVYYYITTLNENYHMPAMPEG |
| | AEEGIRKGIYKLETIEGSKGKVQLLGSGSXLRHVREAAEILAKDYGV |
| | GSDVYSVTSFTELARDGQDCERWNMLHPLETPRVPYIAQVMNDAPAV |
| | ASTDYMKLFAEQVRTYVPADDYRVLGTDGFGRSDSREMLRHHFEVDA |
| | SYVVVAALGELAKRGEIDKKVVADAIAKFNIDADKVNPRLA* |
| aceF | MAIEIKVPDIGADEVEITEILVKVGDKVEAEQSLITVEGDKASMEVP |
| SEQ ID | SPQAGIVKEIKVSVGDKTQTGALIMIFDSADGAADAAPAQAEEKKEA |
| NO: 39 | APAAAPAAAAAKDVNVPDIGSDEVEVTEILVKVGDKVEAEQSLITVE |
| | GDKASMEVPAPFAGTVKEIKVNVGDKVSTGSLIMVFEVAGEAGAAAP |
| | AAKQEAAPAAAPAPAAGVKEVNVPDIGGDEVEVTEVMVKVGDKVAAE |
| | QSLITVEGDKASMEVPAPFAGVVKELKVNVGDKVKTGSLIMIFEVEG |
| | AAPAAAPAKQEAAAPAPAAKAEAPAAAPAAKAEGKSEFAENDAYVHA |
| | TPLIRRLAREFGVNLAKVKGTGRKGRILREDVQAYVKEAIKRAEAAP |
| | AATGGGIPGMLPWPKVDFSKFGEIEEVELGRIQKISGANLSRNWVMI |
| | PHVTHFDKTDITELEAFRKQQNEEAAKRKLDVKITPVVFIMKAVAAA |
| | LEQMPRFNSSLSEDGQRLTLKKYINIGVAVDIPNGLVVPVFKDVNKK |
| | GIIELSRELMTISKKARDGKLTAGEMQGGCFTISSIGGLGTTHFAPI |
| | VNAPEVAILGVSKSAMEPVWNGKEFVPRLMLPISLSFDHRVIDGADG |
| | ARFITIINNTLSDIRRLVM* |
| Lpd | MSTEIKTQVVVLGAGPAGYSAAFRCADLGLETVIVERYNTLGGVCLN |
| SEQ ID | VGCIPSKALLHVAKVIEEAKALAEHGIVFGEPKTDIDKIRTWKEKVI |
| NO: 40 | NQLTGGLAGMAKGRKVKVVMGLGKFTGANTLEVEGENGKTVINFDNA |
| | IIAAGSRPIQLPFIPHEDPRIWDSTDALELKEVPERLLVMGGGIIGL |
| | EMGTVYHALGSQIDVVEMFDQVIPAADKDIVKVFTKRISKKFNLMLE |
| | TKVTAVEAKEDGIYVTMEGKKAPAEPQRYDAVLVAIGRVPNGKNLDA |
| | GKAGVEVDDRGFIRVDKQLRTNVPHIFAIGDIVGQPMLAHKGVHEGH |
| | VAAEVIAGKKHYFDPKVIPSIAYTKPEVAWVGLTEKEAKEKGISYET |
| | ATFPWAASGRAIASDCADGMTKLIFDKESHRVIGGAIVGTNGGELLG |
| | EIGLAIEMGCDAEDIALTIHAHPTLHESVGLAAEVFEGSITDLPNPK |
| | AKKK* |
| tesB | MSQALKNLLTLLNLEKIEEGLFRGQSEDLGLRQVFGGQVVGQALYAA |
| SEQ ID | KETVPEERLVHSFHSYFLRPGDSKKPIIYDVETLRDGNSFSARRVAA |
| NO: 41 | IQNGKPIFYMTASFQAPEAGFEHQKTMPSAPAPDGLPSETQIAQSLA |
| | HLLPPVLKDKFICDRPLEVRPVEFHNPLKGHVAEPHRQVWIRANGSV |
| | PDDLRVHQYLLGYASDLNFLPVALQPHGIGFLEPGIQIATIDHSMWF |
| | HRPFNLNEWLLYSVESTSASSARGFVRGEFYTQDGVLVASTVQEGVM |
| | RNKN* |
| acuI | MRAVLIEKSDDTQSVSVTELAEDQLPEGDVLVDVAYSTLNYKDALAI |
| SEQ ID | TGKAPVVRRFPMVPGIDFTGTVAQSSHADFKPGDRVILNGWGVGEKH |
| NO: 42 | WGGLAERARVRGDWLVPLPAPLDLRQAAMIGTAGYTAMLCVLALERH |
| | GVVPGNGEIVVSGAAGGVGSVATTLLAAKGYEVAAVTGRASEAEYLR |
| | GLGAASVIDRNELTGKVRPLGQERWAGGIDVAGSTVLANMLSMMKYR |
| | GVVAACGLAAGMDLPASVAPFILRGMTLAGVDSVMCPKTDRLAAWAR |
| | LASDLDPAKLEEMTTELPFSEVIETAPKFLDGTVRGRIVIPVTP* |
| Sbm | MSNVQEWQQLANKELSRREKTVDSLVHQTAEGIAIKPLYTEADLDNL |
| SEQ ID | EVTGTLPGLPPYVRGPRATMYTAQPWTIRQYAGFSTAKESNAFYRRN |
| NO: 43 | LAAGQKGLSVAFDLATHRGYDSDNPRVAGDVGKAGVAIDTVEDMKVL |
| | FDQIPLDKMSVSMTMNGAVLPVLAFYIVAAEEQGVTPDKLTGTIQND |
| | ILKEYLCRNTYIYPPKPSMRIIADIIAWCSGNMPRFNTISISGYHMG |
| | EAGANCVQQVAFTLADGIEYIKAAISAGLKIDDFAPRLSFFFGIGMD |
| | LFMNVAMLRAARYLWSEAVSGFGAQDFKSLALRTHCQTSGWSLTEQD |
| | PYNNVIRTTIEALAATLGGTQSLHTNAFDEALGLPTDFSARIARNTQ |
| | IIIQEESELCRTVDPLAGSYYIESLTDQIVKQARAIIQQIDEAGGMA |
| | KAIEAGLPKRMIEEASAREQSLIDQGKRVIVGVNKYKLDHEDETDVL |
| | EIDNVMVRNEQIASLERIRATRDDAAVTAALMALTHAAQHNENLLAA |
| | AVNAARVRATLGEISDALEVAFDRYLVPSQCVTGVIAQSYHQSEKSA |
| | SEFDATVAQTEQFLADNGRRPRILIAKMGQDGHDRGAKVIASAYSDL |
| | GFDVDLSPMFSTPEEIARLAVENDVHVVGASSLAAGHKTLIPELVEA |
| | LKKWGREDICVVAGGVIPPQDYAFLQERGVAAIYGPGTPMLDSVRDV |
| | LNLISQHHD* |
| ygfD | MINEATLAESIRRLRQGERATLAQAMTLVESRHPRHQALSTQLLDAI |
| SEQ ID | MPYCGNTLRLGVTGTPGAGKSTFLEAFGMLLIREGLKVAVIAVDPSS |
| NO: 44 | PVTGGSILGDKTRMNDLARAEAAFIRPVPSSGHLGGASQRARELMLL |
| | CEAAGYDVVIVETVGVGQSETEVARMVDCFISLQIAGGGDDLQGIKK |
| | GLMEVADLIVINKDDGDNHTNVAIARHMYESALHILRRKYDEWQPRV |
| | LTCSALEKRGIDEIWHAIIDFKTALTASGRLQQVRQQQSVEWLRKQT |
| | EEEVLNHLFANEDFDRYYRQTLLAVKNNTLSPRTGLRQLSEFIQTQY |
| | FD* |
| ygfG | MSYQYVNVVTINKVAVIEFNYGRKLNALSKVFIDDLMQALSDLNRPE |
| SEQ ID | IRCIILRAPSGSKVFSAGHDIHELPSGGRDPLSYDDPLRQITRMIQK |
| NO: 45 | FPKPIISMVEGSVWGGAFEMIMSSDLIIAASTSTFSMTPVNLGVPYN |
| | LVGIHNLTRDAGFHIVKELIFTASPITAQRALAVGILNHVVEVEELE |
| | DFTLQMAHHISEKAPLAIAVIKEELRVLGEAHTMNSDEFERIQGMRR |
| | AVYDSEDYQEGMNAFLEKRKPNFVGH* |
| yghH | METQWTRMTANEAAEIIQHNDMVAFSGFTPAGSPKALPTAIARRANE |
| SEQ ID | QHEAKKPYQIRLLTGASISAAADDVLSDADAVSNRAPYQTSSGLRKK |
| NO: 46 | INQGAVSFVDLHLSEVAQMVNYGFFGDIDVAVIEASALAPDGRVWLT |
| | SGIGMAPTVVLLRAKKVHELNHYHDPRVAELADIVIPGAPPRRNSVS |
| | IFHAMDRVGTRYVQIDPKKIVAVVETNLPDAGNMLDKQNPMCQQIAD |
| | NVVTFLLQEMAHGRIPPEFLPLQSGVGNINNAVMARLGENPVIPPFM |
| | MYSEVLQESVVHLLETGKISGASASSLTISADSLRKIYDNMDYFASR |
| | IVLRPQEISNNPEIIRRLGVIALNVGLEFDIYGHANSTHVAGVDLMN |
| | GIGGSGDFERNAYLSIFMAPSIAKEGKISTVVPMCSRVDHSEHSVKV |
| | IITEQGIADLRGLSPLQRARTIIDNCAHPMYRDYLHRYLENAPGGHI |
| | HHDLSHVFDLHRNLIATGSMLG* |
| mutA | MSSTDQGTNPADTDDLTPTTLSLAGDFPKATEEQWEREVEKVFNRGRP |
| SEQ ID | PEKQLTFAECLKRLTVHTVDGIDIVPMYRPKDAPKKLGYPGVTPFTRG |
| NO: 47 | TTVRNGDMDAWDVRALHEDPDEKFTRKAILEDLERGVTSLLLRVDPDA |
| | IAPEHLDEVLSDVLLEMTKVEVFSRYDQGAAAEALMGVYERSDKPAKD |
| | LALNLGLDPIGFAALQGTEPDLTVLGDWVRRLAKFSPDSRAVTIDANV |
| | YHNAGAGDVAELAWALATGAEYVRALVEQGFNATEAFDTINFRVTATH |
| | DQFLTIARLRALREAWARIGEVFGVDEDKRGARQNAITSWRELTREDP |
| | YVNILRGSIATFSASVGGAESITTLPFTQALGLPEDDFPLRIARNTGI |
| | VLAEEVNIGRVNDPAGGSYYVESLTRTLADAAWKEFQEVEKLGGMSKA |
| | VMTEHVTKVLDACNAERAKRLANRKQPITAVSEFPMIGARSIETKPFP |
| | TAPARKGLAWHRDSEVFEQLMDRSTSVSERPKVFLACLGTRRDFGGRE |
| | GFSSPVWHIAGIDTPQVEGGTTAEIVEAFKKSGAQVADLCSSAKIYAQ |
| | QGLEVAKALKAAGAKALYLSGAFKEFGDDAAEAEKLIDGRLYMGMDVV |
| | DTLSSTLDILGVAK |

mutB

| | |
|---|---|
| SEQ ID | VSTLPRFDSVDLGNAPVPADAAQRFEELAAKAGTEEAWETAEQIPVGT |
| NO: 48 | LFNEDVYKDMDWLDTYAGIPPFVHGPYATMYAFRPWTIRQYAGFSTAK |
| | ESNAFYRRNLAAGQKGLSVAFDLPTHRGYDSDNPRVAGDVGMAGVAID |
| | SIYDMRELFAGIPLDQMSVSMTMNGAVLPILALYVVTAEEQGVKPEQL |
| | AGTIQNDILKEFMVRNTYIYPPQPSMRIISEIFAYTSANMPKWNSISI |
| | SGYHMQEAGATADIEMAYTLADGVDYIRAGESVGLNVDQFAPRLSFFW |
| | GIGMNFFMEVAKLRAARMLWAKLVHQFGPKNPKSMSLRTHSQTSGWSL |
| | TAQDVYNNVVRTCIEAMAATQGHTQSLHTNSLDEAIALPTDFSARIAR |
| | NTQLFLQQESGTTRVIDPWSGSAYVEELTWDLARKAWGHIQEVEKVGG |
| | MAKAIEKGIPKMRIEEAAARTQARIDSGRQPLIGVNKYRLEHEPPLDV |
| | LKVDNSTVLAEQKAKLVKLRAERDPEKVKAALDKITWAAANPDDKDPD |
| | RNLLKLCIDAGRAMATVGEMSDALEKVFGRYTAQIRTISGVYSKEVKN |
| | TPEVEEARELVEEFEQAEGRRPRILLAKMGQDGHDRGQKVIATAYADL |
| | GFDVDVGPLFQTPEETARQAVEADVHVVGVSSLAGGHLTLVPALRKEL |
| | DKLGRPDILITVGGVIPEQDFDELRKDGAVEIYTPGTVIPESAISLVK |
| | KLRASLDA |
| GI:18042134 | MSNEDLFICIDHVAYACPDADEASKYYQETFGWHELHREENPEQGVVE |
| SEQ ID | IMMAPAAKLTEHMTQVQVMAPLNDESTVAKWLAKHNGRAGLHHMAWRV |
| NO: 49 | DDIDAVSATLRERGVQLLYDEPKLGTGGNRINFMHPKSGKGVLIELTQ |
| | YPKN |
| mmdA | MAENNNLKLASTMEGRVEQLAEQRQVIEAGGGERRVEKQHSQGKQTAR |
| SEQ ID | ERLNNLLDPHSFDEVGAFRKHRTTLFGMDKAVVPADGVVTGRGTILGR |
| NO: 50 | PVHAASQDFTVMGGSAGETQSTKVVETMEQALLTGTPFLFFYDSGGAR |
| | IQEGIDSLSGYGKMFFANVKLSGVVPQIAIIAGPCAGGASYSPALTDF |
| | IIMTKKAHMFITGPQVIKSVTGEDVTADELGGAEAHMAISGNIHFVAE |
| | DDDAAELIAKKLLSFLPQNNTEEASFVNPNNDVSPNTELRDIVPIDGK |
| | KGYDVRDVIAKIVDWGDYLEVKAGYATNLVTAFARVNGRSVGIVANQP |
| | SVMSGCLDINASDKAAEFVNFCDSFNIPLVQLVDVPGFLPGVQQEYGG |
| | IIRHGAKMLYAYSEATVPKITVVLRKAYGGSYLAMCNRDLGADAVYAW |
| | PSAEIAVMGAEGAANVIFRKEIKAADDPDAMRAEKIEEYQNAFNTPYV |
| | AAARGQVDDVIDPADTRRKIASALEMYATKRQTRPAKKHGNFPC |
| PFREUD_ | MSPREIEVSEPREVGITELVLRDAHQSLMATRMAMEDMVGACADIDAA |
| 18870 | GYWSVECWGGATYDSCIRFLNEDPWERLRTFRKLMPNSRLQMLLRGQN |
| SEQ ID | LLGYRHYNDEVVDRFVDKSAENGMDVFRVFDAMNDPRNMAHAMAAVKK |
| NO: 51 | AGKHAQGTICYTISPVHTVEGYVKLAGQLLDMGADSIALKDMAALLKP |
| | QPAYDIIKAIKDTYGQKTQINLHCHSTTGVTEVSLMKAIEAGVDVVDT |
| | AISSMSLGPGHNPTESVAEMLEGTGYTTNLDYDRLHKIRDHFKAIRPK |
| | YKKFESKTLVDTSIFKSQIPGGMLSNMESQLRAQGAEDKMDEVMAEVP |
| | RVRKAAGFPPLVTPSSQIVGTQAVFNVMMGEYKRMTGEFADIMLGYYG |
| | ASPADRDPKVVKLAEEQSGKKPITQRPADLLPPEWEEQSKEAAALKGF |
| | NGTDEDVLTYALFPQVAPVFFEHRAEGPHSVALTDAQLKAEAEGDEKS |
| | LAVAGPVTYNVNVGGTVREVTVQQA |
| Bccp | MKLKVTVNGTAYDVDVDVDKSHENPMGTILFGGGTGGAPAPRAAGGAG |
| SEQ ID | AGKAGEGEIPAPLAGTVSKILVKEGDTVKAGQTVLVLEAMKMETEINA |
| NO: 52 | PTDGKVEKVLVKERDAVQGGQGLIKIG |

[0261] In some embodiments, the genetically engineered bacteria encode one or more polypeptide sequences of Table 5 (SEQ ID NO: 27-SEQ ID NO: 52) or a functional fragment or variant thereof. In some embodiments, genetically engineered bacteria comprise a polypeptide sequence that is at least about 80%, at least about 85%, at least about 90%, at least about 95%, or at least about 99% homologous to the polypeptide sequence of one or more polypeptide sequence of Table 5 (SEQ ID NO: 27-SEQ ID NO: 52) or a functional fragment thereof.

[0262] In one embodiment, the bacterial cell comprises a heterologous propionate gene cassette. In some embodiments, the disclosure provides a bacterial cell that comprises a heterologous propionate gene cassette operably linked to a first promoter. In one embodiment, the first promoter is an inducible promoter. In one embodiment, the bacterial cell comprises a propionate gene cassette from a different organism, e.g., a different species of bacteria. In another embodiment, the bacterial cell comprises more than one copy of a native gene encoding a propionate gene cassette. In yet another embodiment, the bacterial cell comprises at least one native gene encoding a propionate gene cassette, as well as at least one copy of a propionate gene cassette from a different organism, e.g., a different species of bacteria. In one embodiment, the bacterial cell comprises at least one, two, three, four, five, or six copies of a gene encoding a propionate gene cassette. In one embodiment, the bacterial cell comprises multiple copies of a gene or genes encoding a propionate gene cassette.

[0263] Multiple distinct propionate gene cassettes are known in the art. In some embodiments, a propionate gene cassette is encoded by a gene cassette derived from a bacterial species. In some embodiments, a propionate gene cassette is encoded by a gene cassette derived from a non-bacterial species. In some embodiments, a propionate gene cassette is encoded by a gene derived from a eukaryotic species, e.g., a fungi. In one embodiment, the gene encoding the propionate gene cassette is derived from an organism of the genus or species that includes, but is not limited to, Clostridium propionicum, Megasphaera elsdenii, or Prevotella ruminicola.

[0264] In one embodiment, the propionate gene cassette has been codon-optimized for use in the engineered bacterial cell. In one embodiment, the propionate gene cassette has been codon-optimized for use in Escherichia coli. In another embodiment, the propionate gene cassette has been codon-optimized for use in Lactococcus. When the propionate gene cassette is expressed in the engineered bacterial cells, the bacterial cells produce more propionate than unmodified bacteria of the same bacterial subtype under the same conditions (e.g., culture or environmental conditions). Thus, the genetically engineered bacteria comprising a heterologous propionate gene cassette may be used to generate propionate to treat liver disease, such as nonalcoholic steatohepatitis (NASH).

[0265] The present disclosure further comprises genes encoding functional fragments of propionate biosynthesis enzymes or functional variants of a propionate biosynthesis enzyme. As used herein, the term “functional fragment thereof” or “functional variant thereof” relates to an element having qualitative biological activity in common with the wild-type enzyme from which the fragment or variant was derived. For example, a functional fragment or a functional variant of a mutated propionate biosynthesis enzyme is one which retains essentially the same ability to synthesize propionate as the propionate biosynthesis enzyme from which the functional fragment or functional variant was derived. For example a polypeptide having propionate biosynthesis enzyme activity may be truncated at the N-terminus or C-terminus, and the retention of propionate biosynthesis enzyme activity assessed using assays known to those of skill in the art, including the exemplary assays provided herein. In one embodiment, the engineered bacterial cell comprises a heterologous gene encoding a propionate biosynthesis enzyme functional variant. In another embodiment, the engineered bacterial cell comprises a heterologous gene encoding a propionate biosynthesis enzyme functional fragment.

[0266] As used herein, the term “percent (%) sequence identity” or “percent (%) identity,” also including “homology,” is defined as the percentage of amino acid residues or nucleotides in a candidate sequence that are identical with the amino acid residues or nucleotides in the reference sequences after aligning the sequences and introducing gaps, if necessary, to achieve the maximum percent sequence identity, and not considering any conservative substitutions as part of the sequence identity. Optimal alignment of the sequences for comparison may be produced, besides manually, by means of the local homology algorithm of Smith and Waterman, 1981, Ads App. Math. 2, 482, by means of the local homology algorithm of Neddleman and Wunsch, 1970, J. Mol. Biol. 48, 443, by means of the similarity search method of Pearson and Lipman, 1988, Proc. Natl. Acad. Sci. USA 85, 2444, or by means of computer programs which use these algorithms (GAP, BESTFIT, FASTA, BLAST P, BLAST N and TFASTA in Wisconsin Genetics Software Package, Genetics Computer Group, 575 Science Drive, Madison, Wis.).

[0267] The present disclosure encompasses propionate biosynthesis enzymes comprising amino acids in its sequence that are substantially the same as an amino acid sequence described herein. Amino acid sequences that are substantially the same as the sequences described herein include sequences comprising conservative amino acid substitutions, as well as amino acid deletions and/or insertions. A conservative amino acid substitution refers to the replacement of a first amino acid by a second amino acid that has chemical and/or physical properties (e.g., charge, structure, polarity, hydrophobicity/hydrophilicity) that are similar to those of the first amino acid. Conservative substitutions include replacement of one amino acid by another within the following groups: lysine (K), arginine (R) and histidine (H); aspartate (D) and glutamate (E); asparagine (N), glutamine (Q), serine (S), threonine (T), tyrosine (Y), K, R, H, D and E; alanine (A), valine (V), leucine (L), isoleucine (I), proline (P), phenylalanine (F), tryptophan (W), methionine (M), cysteine (C) and glycine (G); F, W and Y; C, S and T. Similarly contemplated is replacing a basic amino acid with another basic amino acid (e.g., replacement among Lys, Arg, His), replacing an acidic amino acid with another acidic amino acid (e.g., replacement among Asp and Glu), replacing a neutral amino acid with another neutral amino acid (e.g., replacement among Ala, Gly, Ser, Met, Thr, Leu, Ile, Asn, Gln, Phe, Cys, Pro, Trp, Tyr, Val).

[0268] In some embodiments, a propionate biosynthesis enzyme is mutagenized; mutants exhibiting increased activity are selected; and the mutagenized gene encoding the propionate biosynthesis enzyme is isolated and inserted into the bacterial cell of the disclosure. The gene comprising the modifications described herein may be present on a plasmid or chromosome.

[0269] In one embodiment, the propionate biosynthesis gene cassette is from Clostridium spp. In one embodiment, the Clostridium spp. is Clostridium propionicum. In another embodiment, the propionate biosynthesis gene cassette is from a Megasphaera spp. In one embodiment, the Megasphaera spp. is Megasphaera elsdenii. In another embodiment, the propionate biosynthesis gene cassette is from Prevotella spp. In one embodiment, the Prevotella spp. is Prevotella ruminicola. Other propionate biosynthesis gene cassettes are well-known to one of ordinary skill in the art.

[0270] In some embodiments, the genetically engineered bacteria comprise the genes pct, lcd, and acr from Clostridium propionicum. In some embodiments, the genetically engineered bacteria comprise acrylate pathway genes for propionate biosynthesis, e.g., pct, lcdA, lcdB, lcdC, etfA, acrB, and acrC. In alternate embodiments, the genetically engineered bacteria comprise pyruvate pathway genes for propionate biosynthesis, e.g., thrA^{fbr}, thrB, thrC, ilvA^{fbr}, aceE, aceF, and lpd, and optionally further comprise tesB. The genes may be codon-optimized, and translational and transcriptional elements may be added.

[0271] In one embodiment, the pct gene has at least about 80% identity with SEQ ID NO: 1. In another embodiment, the pct gene has at least about 85% identity with SEQ ID NO: 1. In one embodiment, the pct gene has at least about 90% identity with SEQ ID NO: 1. In one embodiment, the pct gene has at least about 95% identity with SEQ ID NO: 1. In another embodiment, the pct gene has at least about 96%, 97%, 98%, or 99% identity with SEQ ID NO: 1. Accordingly, in one embodiment, the pct gene has at least about 80%, 81%, 82%, 83%, 84%, 85%, 86%, 87%, 88%, 89%, 90%, 91%, 92%, 93%, 94%, 95%, 96%, 97%, 98%, or 99% identity with SEQ ID NO: 1. In another embodiment, the pct gene comprises the sequence of SEQ ID NO: 1. In yet another embodiment the pct gene consists of the sequence of SEQ ID NO: 1.

[0272] In one embodiment, the lcdA gene has at least about 80% identity with SEQ ID NO: 2. In another embodiment, the lcdA gene has at least about 85% identity with SEQ ID NO: 2. In one embodiment, the lcdA gene has at least about 90% identity with SEQ ID NO: 2. In one embodiment, the lcdA gene has at least about 95% identity with SEQ ID NO: 2. In another embodiment, the lcdA gene has at least about 96%, 97%, 98%, or 99% identity with SEQ ID NO: 2. Accordingly, in one embodiment, the lcdA gene has at least about 80%, 81%, 82%, 83%, 84%, 85%, 86%, 87%, 88%, 89%, 90%, 91%, 92%, 93%, 94%, 95%, 96%, 97%, 98%, or 99% identity with SEQ ID NO: 2. In another embodiment, the lcdA gene comprises the sequence of SEQ ID NO: 2. In yet another embodiment the lcdA gene consists of the sequence of SEQ ID NO: 2.

[0273] In one embodiment, the lcdB gene has at least about 80% identity with SEQ ID NO: 3. In another embodiment, the lcdB gene has at least about 85% identity with SEQ ID NO: 3. In one embodiment, the lcdB gene has at least about 90% identity with SEQ ID NO: 3. In one embodiment, the lcdB gene has at least about 95% identity with SEQ ID NO: 3. In another embodiment, the lcdB gene has at least about 96%, 97%, 98%, or 99% identity with SEQ ID NO: 3. Accordingly, in one embodiment, the lcdB gene has at least about 80%, 81%, 82%, 83%, 84%, 85%, 86%, 87%, 88%, 89%, 90%, 91%, 92%, 93%, 94%, 95%, 96%, 97%, 98%, or 99% identity with SEQ ID NO: 3. In another embodiment, the lcdB gene comprises the sequence of SEQ ID NO: 3. In yet another embodiment the lcdB gene consists of the sequence of SEQ ID NO: 3.

[0274] In one embodiment, the lcdC gene has at least about 80% identity with SEQ ID NO: 4. In another embodiment, the lcdC gene has at least about 85% identity with SEQ ID NO: 4. In one embodiment, the lcdC gene has at least about 90% identity with SEQ ID NO: 4. In one embodiment, the lcdC gene has at least about 95% identity with SEQ ID NO: 4. In another embodiment, the lcdC gene has at least about 96%, 97%, 98%, or 99% identity with SEQ ID NO: 4. Accordingly, in one embodiment, the lcdA gene has at least about 80%, 81%, 82%, 83%, 84%, 85%, 86%, 87%, 88%, 89%, 90%, 91%, 92%, 93%, 94%, 95%, 96%, 97%, 98%, or 99% identity with SEQ ID NO: 4. In another embodiment, the lcdC gene comprises the sequence of SEQ ID NO: 4. In yet another embodiment the lcdC gene consists of the sequence of SEQ ID NO: 4.

[0275] In one embodiment, the e0 gene has at least about 80% identity with SEQ ID NO: 5. In another embodiment, the e0 gene has at least about 85% identity with SEQ ID NO: 5. In one embodiment, the etfA gene has at least about 90% identity with SEQ ID NO: 5. In one embodiment, the etfA gene has at least about 95% identity with SEQ ID NO: 5. In another embodiment, the etfA gene has at least about 96%, 97%, 98%, or 99% identity with SEQ ID NO: 5. Accordingly, in one embodiment, the etfA gene has at least about 80%, 81%, 82%, 83%, 84%, 85%, 86%, 87%, 88%, 89%, 90%, 91%, 92%, 93%, 94%, 95%, 96%, 97%, 98%, or 99% identity with SEQ ID NO: 5. In another embodiment, the e0 gene comprises the sequence of SEQ ID NO: 5. In yet another embodiment the etfA gene consists of the sequence of SEQ ID NO: 5.

[0276] In one embodiment, the acrB gene has at least about 80% identity with SEQ ID NO: 6. In another embodiment, the acrB gene has at least about 85% identity with SEQ ID NO: 6. In one embodiment, the acrB gene has at least about 90% identity with SEQ ID NO: 6. In one embodiment, the acrB gene has at least about 95% identity with SEQ ID NO: 6. In another embodiment, the acrB gene has at least about 96%, 97%, 98%, or 99% identity with SEQ ID NO: 6. Accordingly, in one embodiment, the acrB gene has at least about 80%, 81%, 82%, 83%, 84%, 85%, 86%, 87%, 88%, 89%, 90%, 91%, 92%, 93%, 94%, 95%, 96%, 97%, 98%, or 99% identity with SEQ ID NO: 6. In another embodiment, the acrB gene comprises the sequence of SEQ ID NO: 6. In yet another embodiment the acrB gene consists of the sequence of SEQ ID NO: 6.

[0277] In one embodiment, the acrC gene has at least about 80% identity with SEQ ID NO: 7. In another embodiment, the acrC gene has at least about 85% identity with SEQ ID NO: 7. In one embodiment, the acrC gene has at least about 90% identity with SEQ ID NO: 7. In one embodiment, the acrC gene has at least about 95% identity with SEQ ID NO: 7. In another embodiment, the acrC gene has at least about 96%, 97%, 98%, or 99% identity with SEQ ID NO: 7. Accordingly, in one embodiment, the acrC gene has at least about 80%, 81%, 82%, 83%, 84%, 85%, 86%, 87%, 88%, 89%, 90%, 91%, 92%, 93%, 94%, 95%, 96%, 97%, 98%, or 99% identity with SEQ ID NO: 7. In another embodiment, the acrC gene comprises the sequence of SEQ ID NO: 7. In yet another embodiment the acrC gene consists of the sequence of SEQ ID NO: 7.

[0278] In one embodiment, the thrA^{fbr} gene has at least about 80% identity with SEQ ID NO: 8. In another embodiment, the thrA^{fbr} gene has at least about 85% identity with SEQ ID NO: 8. In one embodiment, the thrA^{fbr} gene has at least about 90% identity with SEQ ID NO: 8. In one embodiment, the thrA^{fbr} gene has at least about 95% identity with SEQ ID NO: 8. In another embodiment, the thrA^{fbr} gene has at least about 96%, 97%, 98%, or 99% identity with SEQ ID NO: 8. Accordingly, in one embodiment, the thrg^{br} gene has at least about 80%, 81%, 82%, 83%, 84%, 85%, 86%, 87%, 88%, 89%, 90%, 91%, 92%, 93%, 94%, 95%, 96%, 97%, 98%, or 99% identity with SEQ ID NO: 8. In another embodiment, the thrA^{fbr} gene comprises the sequence of SEQ ID NO: 8. In yet another embodiment the thrA^{fbr} gene consists of the sequence of SEQ ID NO: 8.

[0279] In one embodiment, the thrB gene has at least about 80% identity with SEQ ID NO: 9. In another embodiment, the thrB gene has at least about 85% identity with SEQ ID NO: 9. In one embodiment, the thrB gene has at least about 90% identity with SEQ ID NO: 9. In one embodiment, the thrB gene has at least about 95% identity with SEQ ID NO: 9. In another embodiment, the thrB gene has at least about 96%, 97%, 98%, or 99% identity with SEQ ID NO: 9. Accordingly, in one embodiment, the thrB gene has at least about 80%, 81%, 82%, 83%, 84%, 85%, 86%, 87%, 88%, 89%, 90%, 91%, 92%, 93%, 94%, 95%, 96%, 97%, 98%, or 99% identity with SEQ ID NO: 9. In another embodiment, the thrB gene comprises the sequence of SEQ ID NO: 9. In yet another embodiment the thrB gene consists of the sequence of SEQ ID NO: 9.

[0280] In one embodiment, the thrC gene has at least about 80% identity with SEQ ID NO: 10. In another embodiment, the thrC gene has at least about 85% identity with SEQ ID NO: 10. In one embodiment, the thrC gene has at least about 90% identity with SEQ ID NO: 10. In one embodiment, the thrC gene has at least about 95% identity with SEQ ID NO: 10. In another embodiment, the thrC gene has at least about 96%, 97%, 98%, or 99% identity with SEQ ID NO: 10. Accordingly, in one embodiment, the thrC gene has at least about 80%, 81%, 82%, 83%, 84%, 85%, 86%, 87%, 88%, 89%, 90%, 91%, 92%, 93%, 94%, 95%, 96%, 97%, 98%, or 99% identity with SEQ ID NO: 10. In another embodiment, the thrC gene comprises the sequence of SEQ ID NO: 10. In yet another embodiment the thrC gene consists of the sequence of SEQ ID NO: 10.

[0281] In one embodiment, the ilvA^{fbr} gene has at least about 80% identity with SEQ ID NO: 11. In another embodiment, the ilvA^{fbr} gene has at least about 85% identity with SEQ ID NO: 11. In one embodiment, the ilvA^{fbr} gene has at least about 90% identity with SEQ ID NO: 11. In one embodiment, the ilvA^{fbr} gene has at least about 95% identity with SEQ ID NO: 11. In another embodiment, the ilvA^{fbr} gene has at least about 96%, 97%, 98%, or 99% identity with SEQ ID NO: 11. Accordingly, in one embodiment, the ilvA^{fbr} gene has at least about 80%, 81%, 82%, 83%, 84%, 85%, 86%, 87%, 88%, 89%, 90%, 91%, 92%, 93%, 94%, 95%, 96%, 97%, 98%, or 99% identity with SEQ ID NO: 11. In another embodiment, the ilvA^{fbr} gene comprises the sequence of SEQ ID NO: 11. In yet another embodiment the ilvA^{fbr} gene consists of the sequence of SEQ ID NO: 11.

[0282] In one embodiment, the aceE gene has at least about 80% identity with SEQ ID NO: 12. In another embodiment, the aceE gene has at least about 85% identity with SEQ ID NO: 12. In one embodiment, the aceE gene has at least about 90% identity with SEQ ID NO: 12. In one embodiment, the aceE gene has at least about 95% identity with SEQ ID NO: 12. In another embodiment, the aceE gene has at least about 96%, 97%, 98%, or 99% identity with SEQ ID NO: 12. Accordingly, in one embodiment, the aceE gene has at least about 80%, 81%, 82%, 83%, 84%, 85%, 86%, 87%, 88%, 89%, 90%, 91%, 92%, 93%, 94%, 95%, 96%, 97%, 98%, or 99% identity with SEQ ID NO: 12. In another embodiment, the aceE gene comprises the sequence of SEQ ID NO: 12. In yet another embodiment the aceE gene consists of the sequence of SEQ ID NO: 12.

[0283] In one embodiment, the aceF gene has at least about 80% identity with SEQ ID NO: 13. In another embodiment, the aceF gene has at least about 85% identity with SEQ ID NO: 13. In one embodiment, the aceF gene has at least about 90% identity with SEQ ID NO: 13. In one embodiment, the aceF gene has at least about 95% identity with SEQ ID NO: 13. In another embodiment, the aceF gene has at least about 96%, 97%, 98%, or 99% identity with SEQ ID NO: 13. Accordingly, in one embodiment, the aceF gene has at least about 80%, 81%, 82%, 83%, 84%, 85%, 86%, 87%, 88%, 89%, 90%, 91%, 92%, 93%, 94%, 95%, 96%, 97%, 98%, or 99% identity with SEQ ID NO: 13. In another embodiment, the aceF gene comprises the sequence of SEQ ID NO: 13. In yet another embodiment the aceF gene consists of the sequence of SEQ ID NO: 13.

[0284] In one embodiment, the lpd gene has at least about 80% identity with SEQ ID NO: 14. In another embodiment, the lpd gene has at least about 85% identity with SEQ ID NO: 14. In one embodiment, the lpd gene has at least about 90% identity with SEQ ID NO: 14. In one embodiment, the lpd gene has at least about 95% identity with SEQ ID NO: 14. In another embodiment, the lpd gene has at least about 96%, 97%, 98%, or 99% identity with SEQ ID NO: 14. Accordingly, in one embodiment, the lpd gene has at least about 80%, 81%, 82%, 83%, 84%, 85%, 86%, 87%, 88%, 89%, 90%, 91%, 92%, 93%, 94%, 95%, 96%, 97%, 98%, or 99% identity with SEQ ID NO: 14. In another embodiment, the lpd gene comprises the sequence of SEQ ID NO: 14. In yet another embodiment the lpd gene consists of the sequence of SEQ ID NO: 14.

[0285] In one embodiment, the tesB gene has at least about 80% identity with SEQ ID NO: 15. In another embodiment, the tesB gene has at least about 85% identity with SEQ ID NO: 15. In one embodiment, the tesB gene has at least about 90% identity with SEQ ID NO: 15. In one embodiment, the tesB gene has at least about 95% identity with SEQ ID NO: 15. In another embodiment, the tesB gene has at least about 96%, 97%, 98%, or 99% identity with SEQ ID NO: 15. Accordingly, in one embodiment, the tesB gene has at least about 80%, 81%, 82%, 83%, 84%, 85%, 86%, 87%, 88%, 89%, 90%, 91%, 92%, 93%, 94%, 95%, 96%, 97%, 98%, or 99% identity with SEQ ID NO: 15. In another embodiment, the tesB gene comprises the sequence of SEQ ID NO: 15. In yet another embodiment the tesB gene consists of the sequence of SEQ ID NO: 15.

[0286] In one embodiment, the acuI gene has at least about 80% identity with SEQ ID NO: 16. In another embodiment, the acuI gene has at least about 85% identity with SEQ ID NO: 16. In one embodiment, the acuI gene has at least about 90% identity with SEQ ID NO: 16. In one embodiment, the acuI gene has at least about 95% identity with SEQ ID NO: 16. In another embodiment, the acuI gene has at least about 96%, 97%, 98%, or 99% identity with SEQ ID NO: 16. Accordingly, in one embodiment, the acuI gene has at least about 80%, 81%, 82%, 83%, 84%, 85%, 86%, 87%, 88%, 89%, 90%, 91%, 92%, 93%, 94%, 95%, 96%, 97%, 98%, or 99% identity with SEQ ID NO: 16. In another embodiment, the acuI gene comprises the sequence of SEQ ID NO: 16. In yet another embodiment the acuI gene consists of the sequence of SEQ ID NO: 16.

[0287] In one embodiment, the sbm gene has at least about 80% identity with SEQ ID NO: 17. In another embodiment, the sbm gene has at least about 85% identity with SEQ ID NO: 17. In one embodiment, the sbm gene has at least about 90% identity with SEQ ID NO: 17. In one embodiment, the sbm gene has at least about 95% identity with SEQ ID NO: 17. In another embodiment, the sbm gene has at least about 96%, 97%, 98%, or 99% identity with SEQ ID NO: 17.0. Accordingly, in one embodiment, the sbm gene has at least about 80%, 81%, 82%, 83%, 84%, 85%, 86%, 87%, 88%, 89%, 90%, 91%, 92%, 93%, 94%, 95%, 96%, 97%, 98%, or 99% identity with SEQ ID NO: 17. In another embodiment, the sbm gene comprises the sequence of SEQ ID NO: 17. In yet another embodiment the sbm gene consists of the sequence of SEQ ID NO: 17.

[0288] In one embodiment, the ygfD gene has at least about 80% identity with SEQ ID NO: 18. In another embodiment, the ygfD gene has at least about 85% identity with SEQ ID NO: 18. In one embodiment, the ygfD gene has at least about 90% identity with SEQ ID NO: 18. In one embodiment, the ygfD gene has at least about 95% identity with SEQ ID NO: 18. In another embodiment, the ygfD gene has at least about 96%, 97%, 98%, or 99% identity with SEQ ID NO: 18.. Accordingly, in one embodiment, the ygfD gene has at least about 80%, 81%, 82%, 83%, 84%, 85%, 86%, 87%, 88%, 89%, 90%, 91%, 92%, 93%, 94%, 95%, 96%, 97%, 98%, or 99% identity with SEQ ID NO: 18. In another embodiment, the ygfD gene comprises the sequence of SEQ ID NO: 18. In yet another embodiment the ygfD gene consists of the sequence of SEQ ID NO: 18.

[0289] In one embodiment, the ygfG gene has at least about 80% identity with SEQ ID NO: 19. In another embodiment, the ygfG gene has at least about 85% identity with SEQ ID NO: 19. In one embodiment, the ygfG gene has at least about 90% identity with SEQ ID NO: 19. In one embodiment, the ygfG gene has at least about 95% identity with SEQ ID NO: 19. In another embodiment, the ygfG gene has at least about 96%, 97%, 98%, or 99% identity with SEQ ID NO: 19.. Accordingly, in one embodiment, the ygfG gene has at least about 80%, 81%, 82%, 83%, 84%, 85%, 86%, 87%, 88%, 89%, 90%, 91%, 92%, 93%, 94%, 95%, 96%, 97%, 98%, or 99% identity with SEQ ID NO: 19. In another embodiment, the ygfG gene comprises the sequence of SEQ ID NO: 19. In yet another embodiment the ygfG gene consists of the sequence of SEQ ID NO: 19.

[0290] In one embodiment, the ygfH gene has at least about 80% identity with SEQ ID NO: 20. In another embodiment, the ygfH gene has at least about 85% identity with SEQ ID NO: 20. In one embodiment, the ygfH gene has at least about 90% identity with SEQ ID NO: 20. In one embodiment, the ygfH gene has at least about 95% identity with SEQ ID NO: 20. In another embodiment, the ygfH gene has at least about 96%, 97%, 98%, or 99% identity with SEQ ID NO: 20.. Accordingly, in one embodiment, the ygfH gene has at least about 80%, 81%, 82%, 83%, 84%, 85%, 86%, 87%, 88%, 89%, 90%, 91%, 92%, 93%, 94%, 95%, 96%, 97%, 98%, or 99% identity with SEQ ID NO: 20. In another embodiment, the ygfH gene comprises the sequence of SEQ ID NO: 20. In yet another embodiment the ygfH gene consists of the sequence of SEQ ID NO: 20.

[0291] In one embodiment, one or more polypeptides encoded by the propionate circuits and expressed by the genetically engineered bacteria have at least about 80% identity with one or more of SEQ ID NO: 27 through SEQ ID NO: 52. In another embodiment, one or more polypeptides encoded by the propionate circuits and expressed by the genetically engineered bacteria have at least about 85% identity with one or more of SEQ ID NO: 27 through SEQ ID NO: 52. In one embodiment, one or more polypeptides encoded by the propionate circuits and expressed by the genetically engineered bacteria have at least about 90% identity with one or more of SEQ ID NO: 27 through SEQ ID NO: 52. In one embodiment, one or more polypeptides encoded by the propionate circuits and expressed by the genetically engineered bacteria have at least about 95% identity with one or more of SEQ ID NO: 27 through SEQ ID NO: 52. In another embodiment, one or more polypeptides encoded by the propionate circuits and expressed by the genetically engineered bacteria have at least about 96%, 97%, 98%, or 99% identity with one or more of SEQ ID NO: 27 through SEQ ID NO: 52. Accordingly, in one embodiment, one or more polypeptides encoded by the propionate circuits and expressed by the genetically engineered bacteria have at least about 80%, 81%, 82%, 83%, 84%, 85%, 86%, 87%, 88%, 89%, 90%, 91%, 92%, 93%, 94%, 95%, 96%, 97%, 98%, or 99% identity with one or more of SEQ ID NO: 27 through SEQ ID NO: 52. In another embodiment, one or more polypeptides encoded by the propionate circuits and expressed by the genetically engineered bacteria one or more polypeptides encoded by the propionate circuits and expressed by the genetically engineered bacteria comprise the sequence of one or more of SEQ ID NO: 27 through SEQ ID NO: 52. In yet another embodiment one or more polypeptides encoded by the propionate circuits and expressed by the genetically engineered bacteria consist of or or more of SEQ ID NO: 27 through SEQ ID NO: 52.

[0292] In some embodiments, one or more of the propionate biosynthesis genes is a synthetic propionate biosynthesis gene. In some embodiments, one or more of the propionate biosynthesis genes is an E. coli propionate biosynthesis gene. In some embodiments, one or more of the propionate biosynthesis genes is a C. glutamicum propionate biosynthesis gene. In some embodiments, one or more of the propionate biosynthesis genes is a C. propionicum propionate biosynthesis gene. In some embodiments, one or more of the propionate biosynthesis genes is a R. sphaeroides propionate biosynthesis gene. The propionate gene cassette may comprise genes for the aerobic biosynthesis of propionate and/or genes for the anaerobic or microaerobic biosynthesis of propionate.

[0293] In some embodiments, the genetically engineered bacteria comprise a combination of propionate biosynthesis genes from different species, strains, and/or substrains of bacteria, and are capable of producing propionate. In some embodiments, one or more of the propionate biosynthesis genes is functionally replaced, modified, and/or mutated in order to enhance stability and/or increase propionate production. In some embodiments, the local production of propionate reduces food intake and ameliorates metabolic disease (Lin et al., 2012). In some embodiments, the genetically engineered bacteria are capable of expressing the propionate biosynthesis cassette and producing propionate in low-oxygen conditions, in the presence of certain molecules or metabolites, in the presence of molecules or metabolites associated with liver damage, inflammation or an inflammatory response, or in the presence of some other metabolite that may or may not be present in the gut, such as arabinose.

[0294] In one embodiment, the propionate gene cassette is directly operably linked to a first promoter. In another embodiment, the propionate gene cassette is indirectly operably linked to a first promoter. In one embodiment, the propionate gene cassette is operably linked to a promoter that it is not naturally linked to in nature.

[0295] In some embodiments, the propionate gene cassette is expressed under the control of a constitutive promoter. In another embodiment, the propionate gene cassette is expressed under the control of an inducible promoter. In some embodiments, the propionate gene cassette is expressed under the control of a promoter that is directly or indirectly induced by exogenous environmental conditions. In one embodiment, the propionate gene cassette is expressed under the control of a promoter that is directly or indirectly induced by low-oxygen or anaerobic conditions, wherein expression of the propionate gene cassette is activated under low-oxygen or anaerobic environments, such as the environment of the mammalian gut. Inducible promoters are described in more detail infra.

[0296] The propionate gene cassette may be present on a plasmid or chromosome in the bacterial cell. In one embodiment, the propionate gene cassette is located on a plasmid in the bacterial cell. In another embodiment, the propionate gene cassette is located in the chromosome of the bacterial cell. In yet another embodiment, a native copy of the propionate gene cassette is located in the chromosome of the bacterial cell, and a propionate gene cassette from a different species of bacteria is located on a plasmid in the bacterial cell. In yet another embodiment, a native copy of the propionate gene cassette is located on a plasmid in the bacterial cell, and a propionate gene cassette from a different species of bacteria is located on a plasmid in the bacterial cell. In yet another embodiment, a native copy of the propionate gene cassette is located in the chromosome of the bacterial cell, and a propionate gene cassette from a different species of bacteria is located in the chromosome of the bacterial cell.

[0297] In some embodiments, the propionate gene cassette is expressed on a low-copy plasmid. In some embodiments, the propionate gene cassette is expressed on a high-copy plasmid. In some embodiments, the high-copy plasmid may be useful for increasing expression of propionate.

### Butyrate

[0298] In some embodiments, the genetically engineered bacteria of the invention comprise a butyrogenic gene cassette and are capable of producing butyrate under particular exogenous environmental conditions. The genetically engineered bacteria may include any suitable set of butyrogenic genes (see, e.g., Table 3). Unmodified bacteria comprising butyrate biosynthesis genes are known and include, but are not limited to, Peptoclostridium, Clostridium, Fusobacterium, Butyrivibrio, Eubacterium, and Treponema. In some embodiments, the genetically engineered bacteria of the invention comprise butyrate biosynthesis genes from a different species, strain, or substrain of bacteria. In some embodiments, the genetically engineered bacteria comprise the eight genes of the butyrate biosynthesis pathway from Peptoclostridium difficile, e.g., Peptoclostridium difficile strain 630: bcd2, eff133, etfA3, thiAl, hbd, crt2, pbt, and buk (Aboulnaga et al., 2013) and are capable of producing butyrate. Peptoclostridium difficile strain 630 and strain 1296 are both capable of producing butyrate, but comprise different nucleic acid sequences for etfA3, thiA1, hbd, crt2, pbt, and buk. In some embodiments, the genetically engineered bacteria comprise a combination of butyrogenic genes from different species, strains, and/or substrains of bacteria and are capable of producing butyrate. For example, in some embodiments, the genetically engineered bacteria comprise bcd2, etfl33, etfA3, and thiA1 from Peptoclostridium difficile strain 630, and hbd, crt2, pbt, and buk from Peptoclostridium difficile strain 1296. Alternatively, a single gene from Treponema denticola (ter, encoding trans-2-enoynl-CoA reductase) is capable of functionally replacing all three of the bcd2, etfB3, and etfA3 genes from Peptoclostridium difficile. Thus, a butyrogenic gene cassette may comprise thiA1, hbd, crt2, pbt, and buk from Peptoclostridium difficile and ter from Treponema denticola. In another example of a butyrate gene cassette, the pbt and buk genes are replaced with tesB (e.g., from E coli). Thus a butyrogenic gene cassette may comprise ter, thiA1, hbd, crt2, and tesB. In some embodiments, the genetically engineered bacteria are capable of expressing the butyrate biosynthesis cassette and producing butyrate in low-oxygen conditions, in the presence of certain molecules or metabolites, in the presence of molecules or metabolites associated with liver damage, inflammation or an inflammatory response, or in the presence of some other metabolite that may or may not be present in the gut, such as arabinose. One or more of the butyrate biosynthesis genes may be functionally replaced or modified, e.g., codon optimized.

[0299] In some embodiments, additional genes may be mutated or knocked out, to further increase the levels of butyrate production. Production under anaerobic conditions depends on endogenous NADH pools. Therefore, the flux through the butyrate pathway may be enhanced by eliminating competing routes for NADH utilization. Non-limiting examples of such competing routes are frdA (converts phosphoenolpyruvate to succinate), ldhA (converts pyruvate to lactate) and adhE (converts Acetyl-CoA to Ethanol). Thus, in certain embodiments, the genetically engineered bacteria further comprise mutations and/or deletions in one or more of frdA, ldhA, and adhE.

[0300] Table 6 depicts the nucleic acid sequences of exemplary genes in exemplary butyrate biosynthesis gene cassettes.

TABLE 6
Exemplary Butyrate Cassette Sequences

| Description | Sequence |
|---|---|
| bcd2 | ATGGATTTAAATTCTAAAAAATATCAGATGCTTAAAGAGCTATA |
| SEQ ID NO: 53 | TGTAAGCTTCGCTGAAAATGAAGTTAAACCTTTAGCAACAGAAC |
| | TTGATGAAGAAGAAAGATTTCCTTATGAAACAGTGGAAAAAATG |
| | GCAAAAGCAGGAATGATGGGTATACCATATCCAAAAGAATATGG |
| | TGGAGAAGGTGGAGACACTGTAGGATATATAATGGCAGTTGAAG |
| | AATTGTCTAGAGTTTGTGGTACTACAGGAGTTATATTATCAGCT |
| | CATACATCTCTTGGCTCATGGCCTATATATCAATATGGTAATGA |
| | AGAACAAAAACAAAAATTCTTAAGACCACTAGCAAGTGGAGAAA |
| | AATTAGGAGCATTTGGTCTTACTGAGCCTAATGCTGGTACAGAT |
| | GCGTCTGGCCAACAAACAACTGCTGTTTTAGACGGGGATGAATA |
| | CATACTTAATGGCTCAAAAATATTTATAACAAACGCAATAGCTG |
| | GTGACATATATGTAGTAATGGCAATGACTGATAAATCTAAGGGG |
| | AACAAAGGAATATCAGCATTTATAGTTGAAAAAGGAACTCCTGG |
| | GTTTAGCTTTGGAGTTAAAGAAAAGAAAATGGGTATAAGAGGTT |
| | CAGCTACGAGTGAATTAATATTTGAGGATTGCAGAATACCTAAA |
| | GAAAATTTACTTGGAAAAGAAGGTCAAGGATTTAAGATAGCAAT |
| | GTCTACTCTTGATGGTGGTAGAATTGGTATAGCTGCACAAGCTT |
| | TAGGTTTAGCACAAGGTGCTCTTGATGAAACTGTTAAATATGTA |
| | AAAGAAAGAGTACAATTTGGTAGACCATTATCAAAATTCCAAAA |
| | TACACAATTCCAATTAGCTGATATGGAAGTTAAGGTACAAGCGG |
| | CTAGACACCTTGTATATCAAGCAGCTATAAATAAAGACTTAGGA |
| | AAACCTTATGGAGTAGAAGCAGCAATGGCAAAATTATTTGCAGC |
| | TGAAACAGCTATGGAAGTTACTACAAAAGCTGTACAACTTCATG |
| | GAGGATATGGATACACTCGTGACTATCCAGTAGAAAGAATGATG |
| | AGAGATGCTAAGATAACTGAAATATATGAAGGAACTAGTGAAGT |
| | TCAAAGAATGGTTATTTCAGGAAAACTATTAAAATAG |
| etfB3 | ATGAATATAGTCGTTTGTATAAAACAAGTTCCAGATACAACAGA |
| SEQ ID NO: 54 | AGTTAAACTAGATCCTAATACAGGTACTTTAATTAGAGATGGAG |
| | TACCAAGTATAATAAACCCTGATGATAAAGCAGGTTTAGAAGAA |
| | GCTATAAAATTAAAAGAAGAAATGGGTGCTCATGTAACTGTTAT |
| | AACAATGGGACCTCCTCAAGCAGATATGGCTTTAAAAGAAGCTT |
| | TAGCAATGGGTGCAGATAGAGGTATATTATTAACAGATAGAGCA |
| | TTTGCGGGTGCTGATACTTGGGCAACTTCATCAGCATTAGCAGG |
| | AGCATTAAAAAATATAGATTTTGATATTATAATAGCTGGAAGAC |
| | AGGCGATAGATGGAGATACTGCACAAGTTGGACCTCAAATAGCT |
| | GAACATTTAAATCTTCCATCAATAACATATGCTGAAGAAATAAA |
| | AACTGAAGGTGAATATGTATTAGTAAAAAGACAATTTGAAGATT |
| | GTTGCCATGACTTAAAAGTTAAAATGCCATGCCTTATAACAACT |
| | CTTAAAGATATGAACACACCAAGATACATGAAAGTTGGAAGAAT |
| | ATATGATGCTTTCGAAAATGATGTAGTAGAAACATGGACTGTAA |
| | AAGATATAGAAGTTGACCCTTCTAATTTAGGTCTTAAAGGTTCT |
| | CCAACTAGTGTATTTAAATCATTTACAAAATCAGTTAAACCAGC |
| | TGGTACAATATACAATGAAGATGCGAAAACATCAGCTGGAATTA |
| | TCATAGATAAATTAAAAGAGAAGTATATCATATAA |
| etfA3 | ATGGGTAACGTTTTAGTAGTAATAGAACAAAGAGAAAATGTAAT |
| SEQ ID NO: 55 | TCAAACTGTTTCTTTAGAATTACTAGGAAAGGCTACAGAAATAG |
| | CAAAAGATTATGATACAAAAGTTTCTGCATTACTTTTAGGTAGT |
| | AAGGTAGAAGGTTTAATAGATACATTAGCACACTATGGTGCAGA |
| | TGAGGTAATAGTAGTAGATGATGAAGCTTTAGCAGTGTATACAA |
| | CTGAACCATATACAAAAGCAGCTTATGAAGCAATAAAAGCAGCT |
| | GACCCTATAGTTGTATTATTTGGTGCAACTTCAATAGGTAGAGA |
| | TTTAGCGCCTAGAGTTTCTGCTAGAATACATACAGGTCTTACTG |
| | CTGACTGTACAGGTCTTGCAGTAGCTGAAGATACAAAATTATTA |
| | TTAATGACAAGACCTGCCTTTGGTGGAAATATAATGGCAACAAT |
| | AGTTTGTAAAGATTTCAGACCTCAAATGTCTACAGTTAGACCAG |
| | GGGTTATGAAGAAAAATGAACCTGATGAAACTAAAGAAGCTGTA |
| | ATTAACCGTTTCAAGGTAGAATTTAATGATGCTGATAAATTAGT |
| | TCAAGTTGTACAAGTAATAAAAGAAGCTAAAAAACAAGTTAAAA |
| | TAGAAGATGCTAAGATATTAGTTTCTGCTGGACGTGGAATGGGT |
| | GGAAAAGAAAACTTAGACATACTTTATGAATTAGCTGAAATTAT |
| | AGGTGGAGAAGTTTCTGGTTCTCGTGCCACTATAGATGCAGGTT |
| | GGTTAGATAAAGCAAGACAAGTTGGTCAAACTGGTAAAACTGTA |
| | AGACCAGACCTTTATATAGCATGTGGTATATCTGGAGCAATACA |
| | ACATATAGCTGGTATGGAAGATGCTGAGTTTATAGTTGCTATAA |
| | ATAAAAATCCAGAAGCTCCAATATTTAAATATGCTGATGTTGGT |
| | ATAGTTGGAGATGTTCATAAAGTGCTTCCAGAACTTATCAGTCA |
| | GTTAAGTGTTGCAAAAGAAAAAGGTGAAGTTTTAGCTAACTAA |
| thiA1 | ATGAGAGAAGTAGTAATTGCCAGTGCAGCTAGAACAGCAGTAGG |
| SEQ ID NO: 56 | AAGTTTTGGAGGAGCATTTAAATCAGTTTCAGCGGTAGAGTTAG |
| | GGGTAACAGCAGCTAAAGAAGCTATAAAAAGAGCTAACATAACT |
| | CCAGATATGATAGATGAATCTCTTTTAGGGGGAGTACTTACAGC |
| | AGGTCTTGGACAAAATATAGCAAGACAAATAGCATTAGGAGCAG |
| | GAATACCAGTAGAAAAACCAGCTATGACTATAAATATAGTTTGT |
| | GGTTCTGGATTAAGATCTGTTTCAATGGCATCTCAACTTATAGC |
| | ATTAGGTGATGCTGATATAATGTTAGTTGGTGGAGCTGAAAACA |
| | TGAGTATGTCTCCTTATTTAGTACCAAGTGCGAGATATGGTGCA |
| | AGAATGGGTGATGCTGCTTTTGTTGATTCAATGATAAAAGATGG |
| | ATTATCAGACATATTTAATAACTATCACATGGGTATTACTGCTG |
| | AAAACATAGCAGAGCAATGGAATATAACTAGAGAAGAACAAGAT |
| | GAATTAGCTCTTGCAAGTCAAAATAAAGCTGAAAAAGCTCAAGC |
| | TGAAGGAAAATTTGATGAAGAAATAGTTCCTGTTGTTATAAAAG |
| | GAAGAAAAGGTGACACTGTAGTAGATAAAGATGAATATATTAAG |
| | CCTGGCACTACAATGGAGAAACTTGCTAAGTTAAGACCTGCATT |
| | TAAAAAAGATGGAACAGTTACTGCTGGTAATGCATCAGGAATAA |
| | ATGATGGTGCTGCTATGTTAGTAGTAATGGCTAAAGAAAAAGCT |
| | GAAGAACTAGGAATAGAGCCTCTTGCAACTATAGTTTCTTATGG |
| | AACAGCTGGTGTTGACCCTAAAATAATGGGATATGGACCAGTTC |
| | CAGCAACTAAAAAAGCTTTAGAAGCTGCTAATATGACTATTGAA |
| | GATATAGATTTAGTTGAAGCTAATGAGGCATTTGCTGCCCAATC |
| | TGTAGCTGTAATAAGAGACTTAAATATAGATATGAATAAAGTTA |
| | ATGTTAATGGTGGAGCAATAGCTATAGGACATCCAATAGGATGC |
| | TCAGGAGCAAGAATACTTACTACACTTTTATATGAAATGAAGAG |
| | AAGAGATGCTAAAACTGGTCTTGCTACACTTTGTATAGGCGGTG |
| | GAATGGGAACTACTTTAATAGTTAAGAGATAG |
| hbd | ATGAAATTAGCTGTAATAGGTAGTGGAACTATGGGAAGTGGTAT |
| SEQ ID NO: 57 | TGTACAAACTTTTGCAAGTTGTGGACATGATGTATGTTTAAAGA |
| | GTAGAACTCAAGGTGCTATAGATAAATGTTTAGCTTTATTAGAT |
| | AAAAATTTAACTAAGTTAGTTACTAAGGGAAAAATGGATGAAGC |
| | TACAAAAGCAGAAATATTAAGTCATGTTAGTTCAACTACTAATT |
| | ATGAAGATTTAAAAGATATGGATTTAATAATAGAAGCATCTGTA |
| | GAAGACATGAATATAAAGAAAGATGTTTTCAAGTTACTAGATGA |
| | ATTATGTAAAGAAGATACTATCTTGGCAACAAATACTTCATCAT |
| | TATCTATAACAGAAATAGCTTCTTCTACTAAGCGCCCAGATAAA |
| | GTTATAGGAATGCATTTCTTTAATCCAGTTCCTATGATGAAATT |
| | AGTTGAAGTTATAAGTGGTCAGTTAACATCAAAAGTTACTTTTG |
| | ATACAGTATTTGAATTATCTAAGAGTATCAATAAAGTACCAGTA |
| | GATGTATCTGAATCTCCTGGATTTGTAGTAAATAGAATACTTAT |
| | ACCTATGATAAATGAAGCTGTTGGTATATATGCAGATGGTGTTG |
| | CAAGTAAAGAAGAAATAGATGAAGCTATGAAATTAGGAGCAAAC |
| | CATCCAATGGGACCACTAGCATTAGGTGATTTAATCGGATTAGA |
| | TGTTGTTTTAGCTATAATGAACGTTTTATATACTGAATTTGGAG |
| | ATACTAAATATAGACCTCATCCACTTTTAGCTAAAATGGTTAGA |
| | GCTAATCAATTAGGAAGAAAAACTAAGATAGGATTCTATGATTA |
| | TAATAAATAA |
| crt2 | ATGAGTACAAGTGATGTTAAAGTTTATGAGAATGTAGCTGTTGA |
| SEQ ID NO: 58 | AGTAGATGGAAATATATGTACAGTGAAAATGAATAGACCTAAAG |
| | CCCTTAATGCAATAAATTCAAAGACTTTAGAAGAACTTTATGAA |
| | GTATTTGTAGATATTAATAATGATGAAACTATTGATGTTGTAAT |
| | ATTGACAGGGGAAGGAAAGGCATTTGTAGCTGGAGCAGATATTG |
| | CATACATGAAAGATTTAGATGCTGTAGCTGCTAAAGATTTTAGT |
| | ATCTTAGGAGCAAAAGCTTTTGGAGAAATAGAAAATAGTAAAAA |
| | AGTAGTGATAGCTGCTGTAAACGGATTTGCTTTAGGTGGAGGAT |
| | GTGAACTTGCAATGGCATGTGATATAAGAATTGCATCTGCTAAA |
| | GCTAAATTTGGTCAGCCAGAAGTAACTCTTGGAATAACTCCAGG |
| | ATATGGAGGAACTCAAAGGCTTACAAGATTGGTTGGAATGGCAA |
| | AAGCAAAAGAATTAATCTTTACAGGTCAAGTTATAAAAGCTGAT |
| | GAAGCTGAAAAAATAGGGCTAGTAAATAGAGTCGTTGAGCCAGA |
| | CATTTTAATAGAAGAAGTTGAGAAATTAGCTAAGATAATAGCTA |
| | AAAATGCTCAGCTTGCAGTTAGATACTCTAAAGAAGCAATACAA |
| | CTTGGTGCTCAAACTGATATAAATACTGGAATAGATATAGAATC |
| | TAATTTATTTGGTCTTTGTTTTTCAACTAAAGACCAAAAAGAAG |
| | GAATGTCAGCTTTCGTTGAAAAGAGAGAAGCTAACTTTATAAAA |
| | GGGTAA |
| pbt | ATGAGAAGTTTTGAAGAAGTAATTAAGTTTGCAAAAGAAAGAGG |
| SEQ ID NO: 59 | ACCTAAAACTATATCAGTAGCATGTTGCCAAGATAAAGAAGTTT |
| | TAATGGCAGTTGAAATGGCTAGAAAAGAAAAAATAGCAAATGCC |
| | ATTTTAGTAGGAGATATAGAAAAGACTAAAGAAATTGCAAAAAG |
| | CATAGACATGGATATCGAAAATTATGAACTGATAGATATAAAAG |
| | ATTTAGCAGAAGCATCTCTAAAATCTGTTGAATTAGTTTCACAA |
| | GGAAAAGCCGACATGGTAATGAAAGGCTTAGTAGACACATCAAT |
| | AATACTAAAAGCAGTTTTAAATAAAGAAGTAGGTCTTAGAACTG |
| | GAAATGTATTAAGTCACGTAGCAGTATTTGATGTAGAGGGATAT |
| | GATAGATTATTTTTCGTAACTGACGCAGCTATGAACTTAGCTCC |
| | TGATACAAATACTAAAAAGCAAATCATAGAAAATGCTTGCACAG |
| | TAGCACATTCATTAGATATAAGTGAACCAAAAGTTGCTGCAATA |
| | TGCGCAAAAGAAAAAGTAAATCCAAAAATGAAAGATACAGTTGA |
| | AGCTAAAGAACTAGAAGAAATGTATGAAAGAGGAGAAATCAAAG |
| | GTTGTATGGTTGGTGGGCCTTTTGCAATTGATAATGCAGTATCT |
| | TTAGAAGCAGCTAAACATAAAGGTATAAATCATCCTGTAGCAGG |
| | ACGAGCTGATATATTATTAGCCCCAGATATTGAAGGTGGTAACA |
| | TATTATATAAAGCTTTGGTATTCTTCTCAAAATCAAAAAATGCA |
| | GGAGTTATAGTTGGGGCTAAAGCACCAATAATATTAACTTCTAG |
| | AGCAGACAGTGAAGAAACTAAACTAAACTCAATAGCTTTAGGTG |
| | TTTTAATGGCAGCAAAGGCATAA |
| buk | ATGAGCAAAATATTTAAAATCTTAACAATAAATCCTGGTTCGAC |
| SEQ ID NO: 60 | ATCAACTAAAATAGCTGTATTTGATAATGAGGATTTAGTATTTG |
| | AAAAAACTTTAAGACATTCTTCAGAAGAAATAGGAAAATATGAG |
| | AAGGTGTCTGACCAATTTGAATTTCGTAAACAAGTAATAGAAGA |
| | AGCTCTAAAAGAAGGTGGAGTAAAAACATCTGAATTAGATGCTG |
| | TAGTAGGTAGAGGAGGACTTCTTAAACCTATAAAAGGTGGTACT |
| | TATTCAGTAAGTGCTGCTATGATTGAAGATTTAAAAGTGGGAGT |
| | TTTAGGAGAACACGCTTCAAACCTAGGTGGAATAATAGCAAAAC |
| | AAATAGGTGAAGAAGTAAATGTTCCTTCATACATAGTAGACCCT |
| | GTTGTTGTAGATGAATTAGAAGATGTTGCTAGAATTTCTGGTAT |
| | GCCTGAAATAAGTAGAGCAAGTGTAGTACATGCTTTAAATCAAA |
| | AGGCAATAGCAAGAAGATATGCTAGAGAAATAAACAAGAAATAT |
| | GAAGATATAAATCTTATAGTTGCACACATGGGTGGAGGAGTTTC |
| | TGTTGGAGCTCATAAAAATGGTAAAATAGTAGATGTTGCAAACG |
| | CATTAGATGGAGAAGGACCTTTCTCTCCAGAAAGAAGTGGTGGA |
| | CTACCAGTAGGTGCATTAGTAAAAATGTGCTTTAGTGGAAAATA |
| | TACTCAAGATGAAATTAAAAAGAAAATAAAAGGTAATGGCGGAC |
| | TAGTTGCATACTTAAACACTAATGATGCTAGAGAAGTTGAAGAA |
| | AGAATTGAAGCTGGTGATGAAAAAGCTAAATTAGTATATGAAGC |
| | TATGGCATATCAAATCTCTAAAGAAATAGGAGCTAGTGCTGCAG |
| | TTCTTAAGGGAGATGTAAAAGCAATATTATTAACTGGTGGAATC |
| | GCATATTCAAAAATGTTTACAGAAATGATTGCAGATAGAGTTAA |
| | ATTTATAGCAGATGTAAAAGTTTATCCAGGTGAAGATGAAATGA |
| | TTGCATTAGCTCAAGGTGGACTTAGAGTTTTAACTGGTGAAGAA |
| | GAGGCTCAAGTTTATGATAACTAA |
| ter | ATGATCGTAAAACCTATGGTACGCAACAATATCTGCCTGAACGC |
| SEQ ID NO: 61 | CCATCCTCAGGGCTGCAAGAAGGGAGTGGAAGATCAGATTGAAT |
| | ATACCAAGAAACGCATTACCGCAGAAGTCAAAGCTGGCGCAAAA |
| | GCTCCAAAAAACGTTCTGGTGCTTGGCTGCTCAAATGGTTACGG |
| | CCTGGCGAGCCGCATTACTGCTGCGTTCGGATACGGGGCTGCGA |
| | CCATCGGCGTGTCCTTTGAAAAAGCGGGTTCAGAAACCAAATAT |
| | GGTACACCGGGATGGTACAATAATTTGGCATTTGATGAAGCGGC |
| | AAAACGCGAGGGTCTTTATAGCGTGACGATCGACGGCGATGCGT |
| | TTTCAGACGAGATCAAGGCCCAGGTAATTGAGGAAGCCAAAAAA |
| | AAAGGTATCAAATTTGATCTGATCGTATACAGCTTGGCCAGCCC |
| | AGTACGTACTGATCCTGATACAGGTATCATGCACAAAAGCGTTT |
| | TGAAACCCTTTGGAAAAACGTTCACAGGCAAAACAGTAGATCCG |
| | TTTACTGGCGAGCTGAAGGAAATCTCCGCGGAACCAGCAAATGA |
| | CGAGGAAGCAGCCGCCACTGTTAAAGTTATGGGGGGTGAAGATT |
| | GGGAACGTTGGATTAAGCAGCTGTCGAAGGAAGGCCTCTTAGAA |
| | GAAGGCTGTATTACCTTGGCCTATAGTTATATTGGCCCTGAAGC |
| | TACCCAAGCTTTGTACCGTAAAGGCACAATCGGCAAGGCCAAAG |
| | AACACCTGGAGGCCACAGCACACCGTCTCAACAAAGAGAACCCG |
| | TCAATCCGTGCCTTCGTGAGCGTGAATAAAGGCCTGGTAACCCG |
| | CGCAAGCGCCGTAATCCCGGTAATCCCTCTGTATCTCGCCAGCT |
| | TGTTCAAAGTAATGAAAGAGAAGGGCAATCATGAAGGTTGTATT |
| | GAACAGATCACGCGTCTGTACGCCGAGCGCCTGTACCGTAAAGA |
| | TGGTACAATTCCAGTTGATGAGGAAAATCGCATTCGCATTGATG |
| | ATTGGGAGTTAGAAGAAGACGTCCAGAAAGCGGTATCCGCGTTG |
| | ATGGAGAAAGTCACGGGTGAAAACGCAGAATCTCTCACTGACTT |
| | AGCGGGGTACCGCCATGATTTCTTAGCTAGTAACGGCTTTGATG |
| | TAGAAGGTATTAATTATGAAGCGGAAGTTGAACGCTTCGACCGT |
| | ATCTGA |
| tesB | ATGAGTCAGGCGCTAAAAAATTTACTGACATTGTTAAATCTGGA |
| SEQ ID NO: 15 | AAAAATTGAGGAAGGACTCTTTCGCGGCCAGAGTGAAGATTTAG |
| | GTTTACGCCAGGTGTTTGGCGGCCAGGTCGTGGGTCAGGCCTTG |
| | TATGCTGCAAAAGAGACCGTCCCTGAAGAGCGGCTGGTACATTC |
| | GTTTCACAGCTACTTTCTTCGCCCTGGCGATAGTAAGAAGCCGA |
| | TTATTTATGATGTCGAAACGCTGCGTGACGGTAACAGCTTCAGC |
| | GCCCGCCGGGTTGCTGCTATTCAAAACGGCAAACCGATTTTTTA |
| | TATGACTGCCTCTTTCCAGGCACCAGAAGCGGGTTTCGAACATC |
| | AAAAAACAATGCCGTCCGCGCCAGCGCCTGATGGCCTCCCTTCG |
| | GAAACGCAAATCGCCCAATCGCTGGCGCACCTGCTGCCGCCAGT |
| | GCTGAAAGATAAATTCATCTGCGATCGTCCGCTGGAAGTCCGTC |
| | CGGTGGAGTTTCATAACCCACTGAAAGGTCACGTCGCAGAACCA |
| | CATCGTCAGGTGTGGATCCGCGCAAATGGTAGCGTGCCGGATGA |
| | CCTGCGCGTTCATCAGTATCTGCTCGGTTACGCTTCTGATCTTA |
| | ACTTCCTGCCGGTAGCTCTACAGCCGCACGGCATCGGTTTTCTC |
| | GAACCGGGGATTCAGATTGCCACCATTGACCATTCCATGTGGTT |
| | CCATCGCCCGTTTAATTTGAATGAATGGCTGCTGTATAGCGTGG |
| | AGAGCACCTCGGCGTCCAGCGCACGTGGCTTTGTGCGCGGTGAG |
| | TTTTATACCCAAGACGGCGTACTGGTTGCCTCGACCGTTCAGGA |
| | AGGGGTGATGCGTAATCACAATTAA |

[0301] Exemplary polypeptide sequences for the production of butyrate by the genetically engineered bacteria are provided in Table 7.

TABLE 7
Exemplary Polypeptide Sequences for Butyrate Production

| Description | Sequence |
|---|---|
| Bcd2 | MDLNSKKYQMLKELYVSFAENEVKPLATELDEEERF |
| SEQ ID NO: 62 | PYETVEKMAKAGMMGIPYPKEYGGEGGDTVGYIMAV |
| | EELSRVCGTTGVILSAHTSLGSWPIYQYGNEEQKQK |
| | FLRPLASGEKLGAFGLTEPNAGTDASGQQTTAVLDG |
| | DEYILNGSKIFITNAIAGDIYVVMAMTDKSKGNKGI |
| | SAFIVEKGTPGFSFGVKEKKMGIRGSATSELIFEDC |
| | RIPKENLLGKEGQGFKIAMSTLDGGRIGIAAQALGL |
| | AQGALDETVKYVKERVQFGRPLSKFQNTQFQLADME |
| | VKVQAARHLVYQAAINKDLGKPYGVEAAMAKLFAAE |
| | TAMEVTTKAVQLHGGYGYTRDYPVERMMRDAKITEI |
| | YEGTSEVQRMVISGKLLK |
| etfB3 | MNIVVCIKQVPDTTEVKLDPNTGTLIRDGVPSIINP |
| SEQ ID NO: 63 | DDKAGLEEAIKLKEEMGAHVTVITMGPPQADMALKE |
| | ALAMGADRGILLTDRAFAGADTWATSSALAGALKNI |
| | DFDIIIAGRQAIDGDTAQVGPQIAEHLNLPSITYAE |
| | EIKTEGEYVLVKRQFEDCCHDLKVKMPCLITTLKDM |
| | NTPRYMKVGRIYDAFENDVVETWTVKDIEVDPSNLG |
| | LKGSPTSVFKSFTKSVKPAGTIYNEDAKTSAGIIID |
| | KLKEKYII |
| etfA3 | MGNVLVVIEQRENVIQTVSLELLGKATEIAKDYDTK |
| SEQ ID NO: 64 | VSALLLGSKVEGLIDTLAHYGADEVIVVDDEALAVY |
| | TTEPYTKAAYEAIKAADPIVVLFGATSIGRDLAPRV |
| | SARIHTGLTADCTGLAVAEDTKLLLMTRPAFGGNIM |
| | ATIVCKDFRPQMSTVRPGVMKKNEPDETKEAVINRF |
| | KVEFNDADKLVQVVQVIKEAKKQVKIEDAKILVSAG |
| | RGMGGKENLDILYELAEIIGGEVSGSRATIDAGWLD |
| | KARQVGQTGKTVRPDLYIACGISGAIQHIAGMEDAE |
| | FIVAINKNPEAPIFKYADVGIVGDVHKVLPELISQL |
| | SVAKEKGEVLAN |
| Ter | MIVKPMVRNNICLNAHPQGCKKGVEDQIEYTKKRIT |
| SEQ ID NO: 65 | AEVKAGAKAPKNVLVLGCSNGYGLASRITAAFGYGA |
| | ATIGVSFEKAGSETKYGTPGWYNNLAFDEAAKREGL |
| | YSVTIDGDAFSDEIKAQVIEEAKKKGIKFDLIVYSL |
| | ASPVRTDPDTGIMHKSVLKPFGKTFTGKTVDPFTGE |
| | LKEISAEPANDEEAAATVKVMGGEDWERWIKQLSKE |
| | GLLEEGCITLAYSYIGPEATQALYRKGTIGKAKEHL |
| | EATAHRLNKENPSIRAFVSVNKGLVTRASAVIPVIP |
| | LYLASLFKVMKEKGNHEGCIEQITRLYAERLYRKDG |
| | TIPVDEENRIRIDDWELEEDVQKAVSALMEKVTGEN |
| | AESLTDLAGYRHDFLASNGFDVEGINYEAEVERFDR |
| | I |
| ThiA | MREVVIASAARTAVGSFGGAFKSVSAVELGVTAAKE |
| SEQ ID NO: 66 | AIKRANITPDMIDESLLGGVLTAGLGQNIARQIALG |
| | AGIPVEKPAMTINIVCGSGLRSVSMASQLIALGDAD |
| | IMLVGGAENMSMSPYLVPSARYGARMGDAAFVDSMI |
| | KDGLSDIFNNYHMGITAENIAEQWNITREEQDELAL |
| | ASQNKAEKAQAEGKFDEEIVPVVIKGRKGDTVVDKD |
| | EYIKPGTTMEKLAKLRPAFKKDGTVTAGNASGINDG |
| | AAMLVVMAKEKAEELGIEPLATIVSYGTAGVDPKIM |
| | GYGPVPATKKALEAANMTIEDIDLVEANEAFAAQSV |
| | AVIRDLNIDMNKVNVNGGAIAIGHPIGCSGARILTT |
| | LLYEMKRRDAKTGLATLCIGGGMGTTLIVKR |
| Hbd | MKLAVIGSGTMGSGIVQTFASCGHDVCLKSRTQGAI |
| SEQ ID NO: 67 | DKCLALLDKNLTKLVTKGKMDEATKAEILSHVSSTT |
| | NYEDLKDMDLIIEASVEDMNIKKDVFKLLDELCKED |
| | TILATNTSSLSITEIASSTKRPDKVIGMHFFNPVPM |
| | MKLVEVISGQLTSKVTFDTVFELSKSINKVPVDVSE |
| | SPGFVVNRILIPMINEAVGIYADGVASKEEIDEAMK |
| | LGANHPMGPLALGDLIGLDVVLAIMNVLYTEFGDTK |
| | YRPHPLLAKMVRANQLGRKTKIGFYDYNK |
| Crt2 | MSTSDVKVYENVAVEVDGNICTVKMNRPKALNAINS |
| SEQ ID NO: 68 | KTLEELYEVFVDINNDETIDVVILTGEGKAFVAGAD |
| | IAYMKDLDAVAAKDFSILGAKAFGEIENSKKVVIAA |
| | VNGFALGGGCELAMACDIRIASAKAKFGQPEVTLGI |
| | TPGYGGTQRLTRLVGMAKAKELIFTGQVIKADEAEK |
| | IGLVNRVVEPDILIEEVEKLAKIIAKNAQLAVRYSK |
| | EAIQLGAQTDINTGIDIESNLFGLCFSTKDQKEGMS |
| | AFVEKREANFIKG |
| Pbt | MRSFEEVIKFAKERGPKTISVACCQDKEVLMAVEMA |
| SEQ ID NO: 69 | RKEKIANAILVGDIEKTKEIAKSIDMDIENYELIDI |
| | KDLAEASLKSVELVSQGKADMVMKGLVDTSIILKAV |
| | LNKEVGLRTGNVLSHVAVFDVEGYDRLFFVTDAAMN |
| | LAPDTNIKKQIIENACTVAHSLDISEPKVAAICAKE |
| | KVNPKMKDTVEAKELEEMYERGEIKGCMVGGPFAID |
| | NAVSLEAAKHKGINHPVAGRADILLAPDIEGGNILY |
| | KALVFFSKSKNAGVIVGAKAPIILTSRADSEETKLN |
| | SIALGVLMAAKA |
| Buk | MSKIFKILTINPGSTSTKIAVEDNEDLVFEKTLRHS |
| SEQ ID NO: 70 | SEEIGKYEKVSDQFEFRKQVIEEALKEGGVKTSELD |
| | AVVGRGGLLKPIKGGTYSVSAAMIEDLKVGVLGEHA |
| | SNLGGIIAKQIGEEVNVPSYIVDPVVVDELEDVARI |
| | SGMPEISRASVVHALNQKAIARRYAREINKKYEDIN |
| | LIVAHMGGGVSVGAHKNGKIVDVANALDGEGPFSPE |
| | RSGGLPVGALVKMCFSGKYTQDEIKKKIKGNGGLVA |
| | YLNTNDAREVEERIEAGDEKAKLVYEAMAYQISKEI |
| | GASAAVLKGDVKAILLTGGIAYSKMFTEMIADRVKF |
| | IADVKVYPGEDEMIALAQGGLRVLTGEEEAQVYDN |
| TesB | MSQALKNLLTLLNLEKIEEGLFRGQSEDLGLRQVFG |
| SEQ ID NO: 41 | GQVVGQALYAAKETVPEERLVHSFHSYFLRPGDSKK |
| | PIIYDVETLRDGNSFSARRVAAIQNGKPIFYMTASF |
| | QAPEAGFEHQKTMPSAPAPDGLPSETQIAQSLAHLL |
| | PPVLKDKFICDRPLEVRPVEFHNPLKGHVAEPHRQV |
| | WIRANGSVPDDLRVHQYLLGYASDLNFLPVALQPHG |
| | IGFLEPGIQIATIDHSMWFHRPFNLNEWLLYSVEST |
| | SASSARGFVRGEFYTQDGVLVASTVEGVMRNHN* |

[0302] The gene products of the bcd2, etfA3, and etfB3 genes in Clostridium difficile form a complex that converts crotonyl-CoA to butyryl-CoA, which may function as an oxygen-dependent co-oxidant. In some embodiments, because the genetically engineered bacteria of the invention are designed to produce butyrate in a microaerobic or oxygen-limited environment, e.g., the mammalian gut, oxygen dependence could have a negative effect on butyrate production in the gut. It has been shown that a single gene from Treponema denticola (ter, encoding trans-2-enoynl-CoA reductase) can functionally replace this three-gene complex in an oxygen-independent manner. In some embodiments, the genetically engineered bacteria comprise a ter gene, e.g., from Treponema denticola, which can functionally replace all three of the bcd2, etfB3, and etfA3 genes, e.g., from Peptoclostridium difficile. In this embodiment, the genetically engineered bacteria comprise thiA1, hbd, crt2, pbt, and buk, e.g., from Peptoclostridium difficile, and ter, e.g., from Treponema denticola, and produce butyrate in low-oxygen conditions, in the presence of certain molecules or metabolites , in the presence of molecules or metabolites associated with liver damage, inflammation or an inflammatory response, or in the presence of some other metabolite that may or may not be present in the gut, such as arabinose..

[0303] In some embodiments, the genetically engineered bacteria of the invention comprise thiA1, hbd, crt2, pbt, and buk, e.g., from Peptoclostridium difficile; ter, e.g., from Treponema denticola; one or more of bcd2, etfB3, and effA3, e.g., from Peptoclostridium difficile; and produce butyrate in low-oxygen conditions, in the presence of certain molecules or metabolites , in the presence of molecules or metabolites associated with liver damage, inflammation or an inflammatory response, or in the presence of some other metabolite that may or may not be present in the gut, such as arabinose. In some embodiments, one or more of the butyrate biosynthesis genes is functionally replaced, modified, and/or mutated in order to enhance stability and/or increase butyrate production in low-oxygen conditions, in the presence of certain molecules or metabolites, in the presence of molecules or metabolites associated with liver damage, inflammation or an inflammatory response, or in the presence of some other metabolite that may or may not be present in the gut, such as arabinose.

[0304] The gene products of pbt and buk convert butyrylCoA to Butyrate. In some embodiments, the pbt and buk genes can be replaced by a tesB gene. tesB can be used to cleave off the CoA from butyryl-coA. In one embodiment, the genetically engineered bacteria comprise bcd2, etfB3, effA3, thiA1, hbd, and crt2, e.g., from Peptoclostridium difficile, and tesB from E. Coli and produce butyrate in low-oxygen conditions, in the presence of molecules or metabolites, in the presence of molecules or metabolites associated with liver damage, inflammation or an inflammatory response, or in the presence of some other metabolite that may or may not be present in the gut, such as arabinose. In one embodiment, the genetically engineered bacteria comprise ter gene (encoding trans-2-enoynl-CoA reductase) e.g., from Treponema denticola, thiA1, hbd, crt2, pbt, and buk, e.g., from Peptoclostridium difficile, and tesB from E. Coli , and produce butyrate in low-oxygen conditions,in the presence of specific molecules or metabolites, in the presence of molecules or metabolites associated with liver damage, inflammation or an inflammatory response, or in the presence of some other metabolite that may or may not be present in the gut, such as arabinose. In some embodiments, one or more of the butyrate biosynthesis genes is functionally replaced, modified, and/or mutated in order to enhance stability and/or increase butyrate production in low-oxygen conditions or in the presence of specific molecules or metabolites, or molecules or metabolites associated with hunger, appetite, craving, obesity, metablic syndrome, insulin resistance, liver damage, or other condition(s) such as inflammation or an inflammatory response, or in the presence of some other metabolite that may or may not be present in the gut, such as arabinose.

[0305] In some embodiments, the local production of butyrate induces the differentiation of regulatory T cells in the gut and/or promotes the barrier function of colonic epithelial cells. In some embodiments, the genetically engineered bacteria comprise genes for aerobic butyrate biosynthesis and/or genes for anaerobic or microaerobic butyrate biosynthesis.

[0306] In some embodiments, the local production of butyrate protects against diet-induced obesity (Lin et al., 2012). In some embodiments, the local production of butyrate protects against diet-induced obesity without causing decreased food intake (Lin et al., 2012). In some embodiments, local butyrate production reduces gut inflammation, a symptom of metabolic disease.

[0307] In one embodiment, the bcd2 gene has at least about 80% identity with SEQ ID NO: 53. In another embodiment, the bcd2 gene has at least about 85% identity with SEQ ID NO: 53. In one embodiment, the bcd2 gene has at least about 90% identity with SEQ ID NO: 53. In one embodiment, the bcd2 gene has at least about 95% identity with SEQ ID NO: 53. In another embodiment, the bcd2 gene has at least about 96%, 97%, 98%, or 99% identity with SEQ ID NO: 53. Accordingly, in one embodiment, the bcd2 gene has at least about 80%, 81%, 82%, 83%, 84%, 85%, 86%, 87%, 88%, 89%, 90%, 91%, 92%, 93%, 94%, 95%, 96%, 97%, 98%, or 99% identity with SEQ ID NO: 53. In another embodiment, the bcd2 gene comprises the sequence of SEQ ID NO: 53. In yet another embodiment the bcd2 gene consists of the sequence of SEQ ID NO: 53.

[0308] In one embodiment, the etfB3 gene has at least about 80% identity with SEQ ID NO: 54. In another embodiment, the etfB3 gene has at least about 85% identity with SEQ ID NO: 54. In one embodiment, the etfB3 gene has at least about 90% identity with SEQ ID NO: 54. In one embodiment, the e03 gene has at least about 95% identity with SEQ ID NO: 54. In another embodiment, the etfB3 gene has at least about 96%, 97%, 98%, or 99% identity with SEQ ID NO: 54. Accordingly, in one embodiment, the e033 gene has at least about 80%, 81%, 82%, 83%, 84%, 85%, 86%, 87%, 88%, 89%, 90%, 91%, 92%, 93%, 94%, 95%, 96%, 97%, 98%, or 99% identity with SEQ ID NO: 54. In another embodiment, the etfB3 gene comprises the sequence of SEQ ID NO: 54. In yet another embodiment the etfB3 gene consists of the sequence of SEQ ID NO: 54.

[0309] In one embodiment, the etfA3 gene has at least about 80% identity with SEQ ID NO: 55. In another embodiment, the etfA3 gene has at least about 85% identity with SEQ ID NO: 55. In one embodiment, the etfA3 gene has at least about 90% identity with SEQ ID NO: 55. In one embodiment, the etfA3 gene has at least about 95% identity with SEQ ID NO: 55. In another embodiment, the etfA3 gene has at least about 96%, 97%, 98%, or 99% identity with SEQ ID NO: 55. Accordingly, in one embodiment, the e03 gene has at least about 80%, 81%, 82%, 83%, 84%, 85%, 86%, 87%, 88%, 89%, 90%, 91%, 92%, 93%, 94%, 95%, 96%, 97%, 98%, or 99% identity with SEQ ID NO: 55. In another embodiment, the etfA3 gene comprises the sequence of SEQ ID NO: 55. In yet another embodiment the etfA3 gene consists of the sequence of SEQ ID NO: 55.

[0310] In one embodiment, the thiA1 gene has at least about 80% identity with SEQ ID NO: 56. In another embodiment, the thiA1 gene has at least about 85% identity with SEQ ID NO: 56. In one embodiment, the thiA1 gene has at least about 90% identity with SEQ ID NO: 56. In one embodiment, the thiA1 gene has at least about 95% identity with SEQ ID NO: 56. In another embodiment, the thiAl gene has at least about 96%, 97%, 98%, or 99% identity with SEQ ID NO: 56. Accordingly, in one embodiment, the thiA1 gene has at least about 80%, 81%, 82%, 83%, 84%, 85%, 86%, 87%, 88%, 89%, 90%, 91%, 92%, 93%, 94%, 95%, 96%, 97%, 98%, or 99% identity with SEQ ID NO: 56. In another embodiment, the thiAl gene comprises the sequence of SEQ ID NO: 56. In yet another embodiment the thiAl gene consists of the sequence of SEQ ID NO: 56.

[0311] In one embodiment, the hbd gene has at least about 80% identity with SEQ ID NO: 57. In another embodiment, the hbd gene has at least about 85% identity with SEQ ID NO: 57. In one embodiment, the hbd gene has at least about 90% identity with SEQ ID NO: 57. In one embodiment, the hbd gene has at least about 95% identity with SEQ ID NO: 57. In another embodiment, the hbd gene has at least about 96%, 97%, 98%, or 99% identity with SEQ ID NO: 57. Accordingly, in one embodiment, the hbd gene has at least about 80%, 81%, 82%, 83%, 84%, 85%, 86%, 87%, 88%, 89%, 90%, 91%, 92%, 93%, 94%, 95%, 96%, 97%, 98%, or 99% identity with SEQ ID NO: 57. In another embodiment, the hbd gene comprises the sequence of SEQ ID NO: 57. In yet another embodiment the hbd gene consists of the sequence of SEQ ID NO: 57.

[0312] In one embodiment, the crt2 gene has at least about 80% identity with SEQ ID NO: 58. In another embodiment, the crt2 gene has at least about 85% identity with SEQ ID NO: 58. In one embodiment, the crt2 gene has at least about 90% identity with SEQ ID NO: 58. In one embodiment, the crt2 gene has at least about 95% identity with SEQ ID NO: 58. In another embodiment, the crt2 gene has at least about 96%, 97%, 98%, or 99% identity with SEQ ID NO: 58. Accordingly, in one embodiment, the crt2 gene has at least about 80%, 81%, 82%, 83%, 84%, 85%, 86%, 87%, 88%, 89%, 90%, 91%, 92%, 93%, 94%, 95%, 96%, 97%, 98%, or 99% identity with SEQ ID NO: 58. In another embodiment, the crt2 gene comprises the sequence of SEQ ID NO: 58. In yet another embodiment the crt2 gene consists of the sequence of SEQ ID NO: 58.

[0313] In one embodiment, the pbt gene has at least about 80% identity with SEQ ID NO: 59. In another embodiment, the pbt gene has at least about 85% identity with SEQ ID NO: 59. In one embodiment, the pbt gene has at least about 90% identity with SEQ ID NO: 59. In one embodiment, the pbt gene has at least about 95% identity with SEQ ID NO: 59. In another embodiment, the pbt gene has at least about 96%, 97%, 98%, or 99% identity with SEQ ID NO: 59. Accordingly, in one embodiment, the pbt gene has at least about 80%, 81%, 82%, 83%, 84%, 85%, 86%, 87%, 88%, 89%, 90%, 91%, 92%, 93%, 94%, 95%, 96%, 97%, 98%, or 99% identity with SEQ ID NO: 59. In another embodiment, the pbt gene comprises the sequence of SEQ ID NO: 59. In yet another embodiment the pbt gene consists of the sequence of SEQ ID NO: 59.

[0314] In one embodiment, the buk gene has at least about 80% identity with SEQ ID NO: 60. In another embodiment, the buk gene has at least about 85% identity with SEQ ID NO: 60. In one embodiment, the buk gene has at least about 90% identity with SEQ ID NO: 60. In one embodiment, the buk gene has at least about 95% identity with SEQ ID NO: 60. In another embodiment, the buk gene has at least about 96%, 97%, 98%, or 99% identity with SEQ ID NO: 60. Accordingly, in one embodiment, the buk gene has at least about 80%, 81%, 82%, 83%, 84%, 85%, 86%, 87%, 88%, 89%, 90%, 91%, 92%, 93%, 94%, 95%, 96%, 97%, 98%, or 99% identity with SEQ ID NO: 60. In another embodiment, the buk gene comprises the sequence of SEQ ID NO: 60. In yet another embodiment the buk gene consists of the sequence of SEQ ID NO: 60.

[0315] In one embodiment, the ter gene has at least about 80% identity with SEQ ID NO: 61. In another embodiment, the ter gene has at least about 85% identity with SEQ ID NO: 61. In one embodiment, the ter gene has at least about 90% identity with SEQ ID NO: 61. In one embodiment, the ter gene has at least about 95% identity with SEQ ID NO: 61. In another embodiment, the ter gene has at least about 96%, 97%, 98%, or 99% identity with SEQ ID NO: 61. Accordingly, in one embodiment, the ter gene has at least about 80%, 81%, 82%, 83%, 84%, 85%, 86%, 87%, 88%, 89%, 90%, 91%, 92%, 93%, 94%, 95%, 96%, 97%, 98%, or 99% identity with SEQ ID NO: 61. In another embodiment, the ter gene comprises the sequence of SEQ ID NO: 61. In yet another embodiment the ter gene consists of the sequence of SEQ ID NO: 61.

[0316] In one embodiment, the tesB gene has at least about 80% identity with SEQ ID NO: 15. In another embodiment, the tesB gene has at least about 85% identity with SEQ ID NO: 15. In one embodiment, the tesB gene has at least about 90% identity with SEQ ID NO: 15. In one embodiment, the tesB gene has at least about 95% identity with SEQ ID NO: 15. In another embodiment, the tesB gene has at least about 96%, 97%, 98%, or 99% identity with SEQ ID NO: 15. Accordingly, in one embodiment, the tesB gene has at least about 80%, 81%, 82%, 83%, 84%, 85%, 86%, 87%, 88%, 89%, 90%, 91%, 92%, 93%, 94%, 95%, 96%, 97%, 98%, or 99% identity with SEQ ID NO: 15. In another embodiment, the tesB gene comprises the sequence of SEQ ID NO: 15. In yet another embodiment the tesB gene consists of the sequence of SEQ ID NO: 15.

[0317] In one embodiment, one or more polypeptides encoded by the butyrate circuits and expressed by the genetically engineered bacteria have at least about 80% identity with one or more of SEQ ID NO: 62 through SEQ ID NO: 70, and SEQ ID NO: 41. In another embodiment, one or more polypeptides encoded by the butyrate circuits and expressed by the genetically engineered bacteria have at least about 85% identity with with one or more of SEQ ID NO: 62 through SEQ ID NO: 70, and SEQ ID NO: 41. In one embodiment, one or more polypeptides encoded by the butyrate circuits and expressed by the genetically engineered bacteria have at least about 90% identity with with one or more of SEQ ID NO: 62 through SEQ ID NO: 70, and SEQ ID NO: 41. In one embodiment, one or more polypeptides encoded by the butyrate circuits and expressed by the genetically engineered bacteria have at least about 95% identity with with one or more of SEQ ID NO: 62 through SEQ ID NO: 70, and SEQ ID NO: 41. In another embodiment, one or more polypeptides encoded by the butyrate circuits and expressed by the genetically engineered bacteria have at least about 96%, 97%, 98%, or 99% identity with with one or more of SEQ ID NO: 62 through SEQ ID NO: 70, and SEQ ID NO: 41. Accordingly, in one embodiment, one or more polypeptides encoded by the butyrate circuits and expressed by the genetically engineered bacteria have at least about 80%, 81%, 82%, 83%, 84%, 85%, 86%, 87%, 88%, 89%, 90%, 91%, 92%, 93%, 94%, 95%, 96%, 97%, 98%, or 99% identity with with one or more of SEQ ID NO: 62 through SEQ ID NO: 70, and SEQ ID NO: 41. In another embodiment, one or more polypeptides encoded by the butyrate circuits and expressed by the genetically engineered bacteria one or more polypeptides encoded by the butyrate circuits and expressed by the genetically engineered bacteria comprise the sequence of with one or more of SEQ ID NO: 62 through SEQ ID NO: 70, and SEQ ID NO: 41. In yet another embodiment one or more polypeptides encoded by the butyrate circuits and expressed by the genetically engineered bacteria consist of the sequence of with one or more of SEQ ID NO: 62 through SEQ ID NO: 70, and SEQ ID NO: 41.

[0318] In some embodiments, one or more of the butyrate biosynthesis genes is a synthetic butyrate biosynthesis gene. In some embodiments, one or more of the butyrate biosynthesis genes is a Treponema denticola butyrate biosynthesis gene. In some embodiments, one or more of the butyrate biosynthesis genes is a C. glutamicum butyrate biosynthesis gene. In some embodiments, one or more of the butyrate biosynthesis genes is a Peptoclostridicum difficile butyrate biosynthesis gene. The butyrate gene cassette may comprise genes for the aerobic biosynthesis of butyrate and/or genes for the anaerobic or microaerobic biosynthesis of butyrate.

[0319] In some embodiments, the genetically engineered bacteria comprise a combination of butyrate biosynthesis genes from different species, strains, and/or substrains of bacteria, and are capable of producing butyrate. In some embodiments, one or more of the butyrate biosynthesis genes is functionally replaced, modified, and/or mutated in order to enhance stability and/or increase butyrate production. In some embodiments, the local production of butyrate reduces food intake and ameliorates metabolic disease (Lin et al., 2012). In some embodiments, the genetically engineered bacteria are capable of expressing the butyrate biosynthesis cassette and producing butyrate in low-oxygen conditions, in the presence of certain molecules or metabolites, in the presence of molecules or metabolites associated with liver damage, inflammation or an inflammatory response, or in the presence of some other metabolite that may or may not be present in the gut, such as arabinose.

[0320] In one embodiment, the butyrate gene cassette is directly operably linked to a first promoter. In another embodiment, the butyrate gene cassette is indirectly operably linked to a first promoter. In one embodiment, the butyrate gene cassette is operably linked to a promoter that it is not naturally linked to in nature.

[0321] In some embodiments, the butyrate gene cassette is expressed under the control of a constitutive promoter. In another embodiment, the butyrate gene cassette is expressed under the control of an inducible promoter. In some embodiments, the butyrate gene cassette is expressed under the control of a promoter that is directly or indirectly induced by exogenous environmental conditions. In one embodiment, the butyrate gene cassette is expressed under the control of a promoter that is directly or indirectly induced by low-oxygen or anaerobic conditions, wherein expression of the butyrate gene cassette is activated under low-oxygen or anaerobic environments, such as the environment of the mammalian gut. Inducible promoters are described in more detail infra.

[0322] The butyrate gene cassette may be present on a plasmid or chromosome in the bacterial cell. In one embodiment, the butyrate gene cassette is located on a plasmid in the bacterial cell. In another embodiment, the butyrate gene cassette is located in the chromosome of the bacterial cell. In yet another embodiment, a native copy of the butyrate gene cassette is located in the chromosome of the bacterial cell, and a butyrate gene cassette from a different species of bacteria is located on a plasmid in the bacterial cell. In yet another embodiment, a native copy of the butyrate gene cassette is located on a plasmid in the bacterial cell, and a butyrate gene cassette from a different species of bacteria is located on a plasmid in the bacterial cell. In yet another embodiment, a native copy of the butyrate gene cassette is located in the chromosome of the bacterial cell, and a butyrate gene cassette from a different species of bacteria is located in the chromosome of the bacterial cell.

[0323] In some embodiments, the butyrate gene cassette is expressed on a low- copy plasmid. In some embodiments, the butyrate gene cassette is expressed on a high-copy plasmid. In some embodiments, the high-copy plasmid may be useful for increasing expression of butyrate.

### Acetate

[0324] In some embodiments, the genetically engineered bacteria of the invention comprise an acetate gene cassette and produce acetate under particular exogenous environmental conditions. The genetically engineered bacteria may include any suitable set of acetate biosynthesis genes. Unmodified bacteria comprising acetate biosynthesis genes are known in the art and are capable of consuming various substrates to produce acetate under aerobic and/or anaerobic conditions (see, e.g., Ragsdale et al., 2008). In some embodiments, the genetically engineered bacteria of the invention comprise acetate biosynthesis genes from a different species, strain, or substrain of bacteria. In some embodiments, the native acetate biosynthesis genes in the genetically engineered bacteria are enhanced. In some embodiments, the genetically engineered bacteria comprise aerobic acetate biosynthesis genes, e.g., from Escherichia coli. In some embodiments, the genetically engineered bacteria comprise anaerobic acetate biosynthesis genes, e.g., from Acetitomaculum, Acetoanaerobium, Acetohalobium, Acetonema, Balutia, Butyribacterium, Clostridium, Moorella, Oxobacter, Sporomusa, and/or Thermoacetogenium. The genetically engineered bacteria may comprise genes for aerobic acetate biosynthesis or genes for anaerobic or microaerobic acetate biosynthesis. In some embodiments, the genetically engineered bacteria comprise both aerobic and anaerobic or microaerobic acetate biosynthesis genes. In some embodiments, the genetically engineered bacteria comprise a combination of acetate biosynthesis genes from different species, strains, and/or substrains of bacteria, and are capable of producing acetate. In some embodiments, one or more of the acetate biosynthesis genes is functionally replaced, modified, and/or mutated in order to enhance stability and/or acetate production. In some embodiments, the genetically engineered bacteria are capable of expressing the acetate biosynthesis cassette and producing acetate in low-oxygen conditions, in the presence of certain molecules or metabolites, in the presence of molecules or metabolites associated with liver damage, inflammation or an inflammatory response, or in the presence of some other metabolite that may or may not be present in the gut, such as arabinose. In some embodiments, the genetically engineered bacteria are capable of producing an alternate short-chain fatty acid.

[0325] In some embodiments, the genetically engineered bacteria produce acetate and butyrate, as described herein (see, e.g., FIG. 13 and FIG. 14). GLP-1

[0326] In some embodiments, the genetically engineered bacteria of the invention are capable of producing GLP-1 or proglucagon. GLP-1 and several other insulin and satiety regulating peptides result from cleaved of preproglucagon. Preproglucagon is proteolytically cleaved in a tissue-specific manner. Post-translational processing in the gut and brain by prohormone convertases results in the secretion of GLP-1 and GLP-2, while the glucagon sequence remains in a larger peptide, glicentin or glicentin-related pancreatic peptide (GRPP) and oxyntomodulin. Glucagon-like peptide 1 (GLP-1) is produced by intestinal cells, e.g., ileal L cells, and is capable of stimulating insulin secretion and the differentiation of insulin-secreting cells and inhibiting glucagon secretion. GLP-1 is capable of restoring glucose sensitivity and increasing satiety.

[0327] Glucagon-like peptide 1 (GLP-1) is also used to treat those suffering from non-alcoholic steatohepatitis by reducing the degree of lipotoxic metabolites, pro-inflammatory substrate, and hepatic lipid deposition. Glucagon-like peptide 1 is well known to those of skill in the art. For example, glucagon-like peptide 1 has been used to stimulate insulin secretion in the treatment of type-two diabetes and non-alcoholic steatohepatitis (NASH). See, for example, Armstrong, et al., J. of Hepatology, 64:399-408 (2016); Bernsmeier, et al., PLOS One, 9(1): e87488 (2014); Kjems, et al., Diabetes, 52:380-386 (2003); Knudsen et al., J. Med. Chem., 43:1664-1669 (2000); MacDonald, et al., Diabetes, 51(supp. 3):5434-5442 (2002); Werner, et al., Regulatory Peptides, 164:58-34 (2010); Drucker and Nauck, Lancet, 368:1696-1705 (2006); Jiminez-Solem, et al., Cur. Opinion in Mol. Therap., 12(6):760-797 (2010); Schnabel, et al., Vasc. Health and Risk Mgmt., 2(1):69-77 (2006); and WO1995/017510, the entire contents of each of which are expressly incorporated herein by reference.

[0328] Proteolytic cleavage of proglucagon produces GLP-1 and GLP-2. GLP-1 adminstration has therapeutic potential in treating type 2 diabetes (Gallwitz et al., 2000). The genetically engineered bacteria may comprise any suitable gene encoding GLP-1 or proglucagon, e.g., human GLP-1 or proglucagon. In some embodiments, a protease inhibitor, e.g., an inhibitor of dipeptidyl peptidase, is also administered to decrease GLP-1 degradation. In some embodiments, the genetically engineered bacteria express a degradation resistant GLP-1 analog (see, e.g., Gallwitz et al., 2000). In some embodiments, the gene encoding GLP-1 or proglucagon is modified and/or mutated, e.g., to enhance stability, increase GLP-1 production, and/or increase metabolic disease attenuation potency. In some embodiments, the local production of GLP-1 induces insulin secretion and/or differentiation of insulin-secreting cells. In some embodiments, the local production of GLP-1 produces satiety in a subject and ameliorates obesity. In some embodiments, the genetically engineered bacteria are capable of expressing GLP-1 or proglucagon in low-oxygen conditions, in the presence of certain molecules or metabolites, in the presence of molecules or metabolites associated with liver damage, inflammation or an inflammatory response, or in the presence of some other metabolite that may or may not be present in the gut, such as arabinose.

TABLE 8
GLP-1 Polynucleotide Sequences

| Description | Sequence |
|---|---|
| GLP-1 (1-37), with | ATGGACGAGTTCGAACGCCACG |
| initiation met codon; | CGGAGGGAACTTTCACTTCTGA |
| codon optimized for | TGTTTCTAGCTATTTGGAGGGC |
| expression in E. coli. | CAGGCTGCGAAAGAGTTTATTG |
| SEQ ID NO: 71 | CTTGGCTGGTTAAAGGTCGTGG |
| | TTAA |
| GLP1 (1-37) codon | GACGAGTTCGAACGCCACGCGG |
| optimized for expression | AGGGAACTTTCACTTCTGATGT |
| in E. coli. | TTCTAGCTATTTGGAGGGCCAG |
| SEQ ID NO: 72 | GCTGCGAAAGAGTTTATTGCTT |
| | GGCTGGTTAAAGGTCGTGGTTA |
| | A |

TABLE 9
GLP-1 Polypeptide Sequences

| Description | Sequence |
|---|---|
| GLP-1 (1-37) | HDEFERHAEGTFTSDVSSYLEGQAAKEFIAW |
| SEQ ID NO: 73 | LVKGRG |
| GLP-1 (1-37) H→M substitution | MDEFERHAEGTFTSDVSSYLEGQAAKEFIAW |
| SEQ ID NO: 74 | LVKGRG |
| GLP-1-(7-37) | HAEGTFTSDVSSYLEGQAAKEFIAWLVKGRG |
| SEQ ID NO: 75 | |
| GLP-1-(7-36)NH2 | HAEGTFTSDVSSYLEGQAAKEFIAWLVKGR |
| SEQ ID NO: 76 | |
| glucagon preproprotein | MKSIYFVAGLFVMLVQGSWQRSLQDTEEKSR |
| (NP_002045.1) 1-20 is signal | SFSASQADPLSDPDQMNEDKRHSQGTFTSDY |
| peptide | SKYLDSRRAQDFVQWLMNTKRNRNNIAKRHD |
| SEQ ID NO: 77 | EFERHAEGTFTSDVSSYLEGQAAKEFIAWLV |
| | KGRGRRDFPEEVAIVEELGRRHADGSFSDEM |
| | NTILDNLAARDFINWLIQTKITDRK |
| Proglucagon (Signal peptide 1- | RSLQDTEEKSRSFSASQADPLSDPDQMNEDK |
| 20; Giucagon-like. peptide 1 | RHSQGTFTSDYSKYLDSRRAQDFVQWLMNTK |
| (92-128); Glucagon-like peptide | RNRNNIAKRHDEFERHAEGTFTSDVSSYLEG |
| 2 146-178 | QAAKEFIAWLVKGRGRRDFPEEVAIVEELGR |
| SEQ ID NO: 78 | RHADGSFSDEMNTILDNLAARDFINWLIQTK |
| | ITDRK |
| Glucagon | HSQGTFTSDYSKYLDSRRAQDFVQWLMNT |
| SEQ ID NO: 79 | |
| Glicentin | RSLQDTEEKSRSFSASQADPLSDPDQMNEDK |
| SEQ ID NO: 80 | RHSQGTFTSDYSKYLDSRRAQDFVQWLMNTK |
| | RNRNNIA |
| Glicentin related peptide | RSLQDTEEKSRSFSASQADPLSDPDQMNED |
| SEQ ID NO: 81 | |
| Oxyntomodulin | HSQGTFTSDYSKYLDSRRAQDFVQWLMNTKR |
| SEQ ID NO: 82 | NRNNIA |

[0329] The circulating active form of GLP-1 is GLP-1(7-37), which has a very short biological half-life of the order of just a few minutes in blood. The relatively low stability of GLP-1 (3-5 min) has significantly limited its clinical utility because of the rapid degradation catalyzed by the enzyme dipeptidyl peptidase IV (DPP-IV), but also other enzymes such as neutral endopeptidase (NEP), plasma kallikrein or plastnin. One strategy to prolong in vivo half-life is stabilization towards degradation by DPPIV, which preferably cleaves N-terminal Xaa-Pro or Xaa-Ala dipeptide sequences. Alteration of that N-terminal sequence, especially the second amino acid, has proven to reduce degradation by DPPIV (e.g., reviewed in Lorenz et al., Recent progress and future options in the development of GLP-1 receptor agonists for the treatment of diabesity; Bioorganic & Medicinal Chemistry Letters, 23 (14); 4011-4018). In some embodiments, the genetically engineered bacteria comprise a cassette encoding GLP-1 fragment or variant, in which the DPP-IV is mutated, such that it can no longer be cleaved by the enzyme.

[0330] GLP-1 is released in a tissue specific manner, though post-translational processing of pre-pro-glucagon, from the neuroendocrine L-cells predominantly in two forms, GLP-1 (7-36) amide, which constitutes approximately 80% of circulating GLP-1, and GLP-1 (7-37) amide. GLP-1 (1-36 amide) is predominantly secreted in the pancreas, whereas GLP-1 (1-37) is secreted in the ileum and hypothalamus.

[0331] In addition, full length GLP-1-(1-37) is produced in much smaller amounts. This full-length form of GLP-1(1-37), was previously thought to be inactive, but was found to stimulate rat intestinal epithelial cells to become glucose-responsive insulin-secreting cells, i.e., full length GLP-1 could convert intestinal epithelial progenitors in the small intestine into insulin-producing cells (Suzuki et al., Glucagon-like peptide 1 (1-37) converts intestinal epithelial cells into insulin-producing cells; Proc Natl Acad Sci U S A. 2003 Apr. 29; 100(9): 5034-5039). While the amounts of GLP-1 (1-37) produced endogenously likely are not sufficient for these effects, secretion of large amounts of GLP-1, e.g., by the genetically engineered bacteria, are likely sufficient to alter a balance in the developmental environment of the intestinal epithelia, leading to the induction of insulin-producing cells from intestinal epithelial progenitors. As such, secretion of full-length GLP-1 by the genetically engineered bacteria of the disclosure is a novel therapeutic strategy for the treatment of a number of diseases related to dysregulation of insulin production and/or secretion, including diabetes.

[0332] GLP-1 analogs, which exhibit extended stability in serum, have become important in the clinic. Exendin-4, a peptide produced in the salivary glands of the Gila monster (Heloderma suspectum), possesses similar glucose regulatory function to the human GLP-1 peptide. In exendin-4, the second amino acid is a Gly rendering it resistant to DPPIV mediated degradation. Furthermore, the Leu21-Ser39 span of exendin-4 forms a compact tertiary fold (the Trp-cage) which shields the side chain of Trp25 from solvent exposure, leading to enhanced helicity and stability of the peptide (see Lorenz et al. for review). Exenatide BID is a synthetic version of exendin-4, represents the first GLP-1 RA approved in 2005 as antidiabetic therapy for the treatment of T2DM. Following the FDA approval of exendin-4, liraglutide and albiglutide, which are long-acting GLP-1 analogs using palmitic acid conjugation and albumin fusion, respectively, were approved. Many other strategies have also been employed to achieve long-acting activity of GLP-1, including dimerization, intra-molecular conjugation, and additional variant positive charged amino acids on the N terminus. Table 10 lists non-limiting examples of GLP-1R agonists. In some embodiments, the genetically engineered bacteria comprise a gene encoding Exenatide. In some embodiments, the genetically engineered bacteria comprise a gene encoding Liraglutide. In some embodiments, the genetically engineered bacteria comprise a gene encoding Lixisenatide. In some embodiments, the genetically engineered bacteria comprise a gene encoding Albiglutide. In some embodiments, the genetically engineered bacteria comprise a gene encoding Dulaglutide. In some embodiments, the genetically engineered bacteria comprise a gene encoding Taspoglutide. In some embodiments, the genetically engineered bacteria comprise a gene encoding Semaglutide.

TABLE 10
Non-limiting examples of GLP-1R agonists

| Name and SEQ ID NO | Sequence | Short description |
|---|---|---|
| Exenatide | HGEGTFTSDLSKQMEE | Second amino acid is a Gly |
| SEQ ID NO: 83 | EAVRLFIEWLKNGGPS | rendering it resistant to |
| | SGAPPPS | DPPIV mediated |
| | | degradation. Furthermore, |
| | | the Leu21-Ser39 span of |
| | | exendin-4 forms a compact |
| | | tertiary fold (the Trp-cage) |
| | | which shields the side chain |
| | | of Trp25 from solvent |
| | | exposure, leading to |
| | | enhanced helicity and |
| | | stability of the peptide |
| Liraglutide | HAEGTFTSDVSSYLEG | a close structural homolog to |
| SEQ ID NO: 84 | QAAKEEFIIAWLVKGR | GLP-1(7-37) with 97% |
| | G | sequence identity to the |
| | | native hormone. Lys in |
| | | position 34 is substituted by |
| | | Arg and a palmitic acid is |
| | | conjugated to Lys in position |
| | | 26 via a glutamate spacer |
| Lixisenatide | HGEGTFTSDLSKQMEE | synthetic analog of exendin- |
| SEQ ID NO: 85 | EAVRLFIEWLKNGGPS | 4. Compared to exendin-4, |
| | SGAPPSKKKKKK | six Lys residues have been |
| | | added to the C-terminus (also |
| | | amidated), while one Pro in |
| | | the C-terminal region has |
| | | been deleted. |
| Albiglutide | HGEGTFTSDVSSYLEG | two copies of GLP-1 are |
| SEQ ID NO: 86 | QAAKEFIAWLVKGRH | fused as tandem repeat to the |
| | GEGTFTSDVSSYLEGQ | N-terminus of albumin. |
| | AAKEFIAWLVKGRDA | DPPIV-resistance is |
| | HKSEVAHRFKDLGEEN | achieved by a single |
| | FKALVLIAFAQYLQQC | substitution, Ala for Gly, at |
| | PFEDHVKLVNEVTEFA | the DPPIV cleavage site. |
| | KTCVADESAENCDKSL | |
| | HTLFGDKLCTVATLRE | |
| | TYGEMADCCAKQEPE | |
| | RNECFLQHKDDNPNLP | |
| | RLVRPEVDVMCTAFH | |
| | DNEETFLKKYLYEIAR | |
| | RHPYFYAPELLFFAKR | |
| | YKAAFTECCQAADKA | |
| | ACLLPKLDELRDEGKA | |
| | SSAKQRLKCASLQKFG | |
| | ERAFKAWAVARLSQR | |
| | FPKAEFAEVSKLVTDL | |
| | TKVHTECCHGDLLECA | |
| | DDRADLAKYICENQDS | |
| | ISSKLKECCEKPLLEKS | |
| | HCIAEVENDEMPADLP | |
| | SLAADFVESKDVCKN | |
| | YAEAKDVFLGMFLYE | |
| | YARRHPDYSVVLLLRL | |
| | AKTYETTLEKCCAAA | |
| | DPHECYAKVFDEFKPL | |
| | VEEPQNLIKQNCELFE | |
| | QLGEYKFQNALLVRY | |
| | TKKVPQVSTPTLVEVS | |
| | RNLGKVGSKCCKHPE | |
| | AKRMPCAEDYLSVVL | |
| | NQLCVLHEKTPVSDRV | |
| | TKCCTESLVNRRPCFS | |
| | ALEVDETYVPKEFNAE | |
| | TFTFHADICTLSEKERQ | |
| | IKKQTALVELVKHKPK | |
| | ATKEQLKAVMDDFAA | |
| | FVEKCCKADDKETCFA | |
| | EEGKKLVAASQAALG | |
| | L | |
| Dulaglutide | HGEGTFTSDVSSYLEE | A recombinant fusion |
| SEQ ID NO: 87 | QAAKEFIAWLVKGGG | protein, which consists of |
| | GGGGSGGGGSGGGGS | two GLP-1 peptides |
| | AESKYGPPCPPCPAPE | covalently linked by a small |
| | AAGGPSVFLFPPKPKD | peptide [tetraglycyl-1- |
| | TLMISRTPEVTCVVVD | seryltetraglycyl-1- |
| | VSQEDPEVQFNWYVD | seryltetraglycyl-1-seryl-1- |
| | GVEVHNAKTKPREEQF | alanyl] to a human IgG4-Fc |
| | NSTYRVVSVLTVLHQD | heavy chain variant. |
| | WLNGKEYKCKVSNKG | Compared to natural GLP-1, |
| | LPSSIEKTISKAKGQPR | the GLP-1 moieties contain |
| | EPQVYTLPPSQEEMTK | amino acid substitutions |
| | NQVSLTCLVKGFYPSD | (Ala8→Gly, Gly26→Glu, |
| | IAVEWESNGQPENNYK | Arg36→Gly) to ensure |
| | TTPPVLDSDGSFFLYSR | protection from DPPIV |
| | LTVDKSRWQEGNVFS | cleavage as well as |
| | CSVMHEALHNHYTQK | maintenance of the potency |
| | SLSLSLG | of the construct. |
| Taspoglutide | His-Aib-Glu-Gly-Thr- | a close analog of natural |
| SEQ ID NO: 88 | Phe-Thr-Ser-Asp-Val-Ser- | GLP-1(7-36) in which the |
| | Ser-Tyr-Leu-Gly-Gly- | unnatural amino acid |
| | Gln-Ala-Ala-Lys-Glu- | aminoisobutyric acid (Aib) |
| | Phe-Ile-Ala-Trp-Leu-Val- | has been introduced in |
| | Lys-Aib-Arg-NH₂ | position 8 and 35 in order to |
| | | avoid degradation by DITIV, |
| | | hut also by other serine |
| | | proteases such as plasma |
| | | kallikrein and plasmin. |
| Semaglutide | MAGAPGPLRLALLLLG | |
| SEQ ID NO: 89 | MVGRAGPRPQGATVS | |
| | LWETVQKWREYRRQC | |
| | QRSLTEDPPPATDLFC | |
| | NRTFDEYACWPDGEP | |
| | GSFVNVSCPWYLPWA | |
| | SSVPQGHVYRFCTAEG | |
| | LWLQKDNSSLPWRDL | |
| | SECEESKRGERSSPEEQ | |
| | LLFLYIIYTVGYALSFS | |
| | ALVIASAILLGFRHLHC | |
| | TRNYIHLNLFASFILRA | |
| | LSVFIKDAALKWMYST | |
| | AAQQHQWDGLLSYQD | |
| | SLSCRLVFLLMQYCVA | |
| | ANYYWLLVEGVYLYT | |
| | LLAFSVLSEQWIFRLY | |
| | VSIGWGVPLLFVVPWG | |
| | IVKYLYEDEGCWTRNS | |
| | NMNYWLIIRLPILFAIG | |
| | VNFLIFVRVICIVVSKL | |
| | KANLMCKTDIKCRLA | |
| | KSTLTLIPLLGTHEVIF | |
| | AFVMDEHARGTLRFIK | |
| | LFTELSFTSFQGLMVAI | |
| | LYCFVNNEVQLEFRKS | |
| | WERWRLEHLHIQRDSS | |
| | MKPLKCPTSSLSSGAT | |
| | AGSSMYTATCQASCS | |

[0333] In one embodiment, GLP-1 and/or a GLP-1R agonist of Table 10 stimulates the rate of insulin secretion in the body. In one embodiment, GLP-1 and/or a GLP-1R agonist of Table 10 inhibits and lowers plasma glucose produced in the body. In one embodiment, GLP-1 and/or a GLP-1R agonist of Table 10 decreases the level of lipotoxic metabolites in the body. In one embodiment, GLP-1 and/or a GLP-1R agonist of Table 10 decreases the degree of pro-inflammatory substrate in the body. In one embodiment, GLP-1 decreases the level of insulin resistance (IR) in the body. In one embodiment, GLP-1 and/or a GLP-1R agonist of Table 10 decreases the level of hepatic lipid deposition in the body. Methods for measuring the insulin secretion rates and glucose levels are well known to one of ordinary skill in the art. For example, blood samples taken periodically, and standard statistical analysis methods may be used to determine the insulin secretion rates and plasma glucose levels in a subject.

[0334] GLP-1 and/or a GLP-1R agonist of Table 10 may be expressed or modified in bacteria of this disclosure in order to enhance insulin stimulation and reduce plasma glucose levels in subjects having liver disease, such as NASH. Specifically, when GLP-1 and/or a GLP-1R agonist of Table 10 is expressed in the engineered bacterial cells of the disclosure, the expressed GLP-1 and/or a GLP-1R agonist of Table 10 will reduce the degree of lipotoxic metabolites, pro-inflammatory substrate, and hepatic lipid deposition in the subject.

[0335] GLP-1 and/or a GLP-1R agonist of Table 10 may be expressed or modified in bacteria of this disclosure in order to enhance insulin stimulation and reduce plasma glucose levels in subjects having type two diabetes, obesity, and/or metabolic syndrome, or metabolic syndrome related disorders, including cardiovascular disorders, and obesity in a subject.

[0336] In one embodiment, the bacterial cell comprises one or more genes encoding a GLP-1 and/or a GLP-1R agonist of Table 10. In some embodiments, the disclosure provides a bacterial cell that comprises a heterologous gene encoding a glucagon-like peptide 1 operably linked to a first promoter. In one embodiment, the first promoter is an inducible promoter. In one embodiment, the bacterial cell comprises at least one, two, three, four, five, or six copies of a gene encoding a glucagon-like peptide 1. In one embodiment, the bacterial cell comprises multiple copies of a gene or genes encoding a glucagon-like peptide 1.

[0337] Multiple distinct embodiments of GLP-1 and/or a GLP-1R agonist of Table 10 are known in the art. In some embodiments, the glucagon-like peptide 1 is encoded by a gene derived from a bacterial species. In some embodiments, a glucagon-like peptide 1 is encoded by a gene derived from a non-bacterial species. In some embodiments, a glucagon-like peptide 1 is encoded by a gene derived from a eukaryotic species, e.g. homo sapiens. In one embodiment, the gene encoding the glucagon-like peptide 1 is expressed in an organism of the genus or species that includes, but is not limited to, Lactobacillus spp., such as Lactobacillus plantarum, Lactobacillus johnsonii, Lactobacillus acidophilus, Lactobacillus reuteri, Lactobacillus brevis, or Lactobacillus gasseri; Bifidobacterium spp., such as Bifidobacterium longum; Bacillus spp., such as Bacillus subtilis, Bacillus licheniformis, Bacillus lentus, Bacillus brevis, Bacillus stearothermophilus, Bacillus alkalophilus, Bacillus amyloliquefaciens, Bacillus coagulans, Bacillus circulans, Bacillus lautus; and Streptomyces spp., such as Streptomyces lividans.

[0338] In one embodiment, the gene encoding the GLP-1 and/or a GLP-1R agonist of Table 10 has been codon-optimized for use in the engineered bacterial cell. In one embodiment, the gene encoding the glucagon-like peptide 1 has been codon-optimized for use in Escherichia coli. In another embodiment, the gene encoding the glucagon-like peptide 1 has been codon-optimized for use in Lactococcus. When the gene encoding the GLP-1 and/or a GLP-1R agonist of Table 10 is expressed in the engineered bacterial cells, the bacterial cells express more GLP-1 and/or a GLP-1R agonist of Table 10 than unmodified bacteria of the same bacterial subtype under the same conditions (e.g., culture or environmental conditions). Thus, the genetically engineered bacteria comprising a heterologous gene encoding a GLP-1 and/or a GLP-1R agonist of Table 10 may be used to express more GLP-1 and/or a GLP-1R agonist of Table 10 to treat liver disease, such as nonalcoholic steatohepatitis, type two diabetes, metabolic syndrome, and metabolic syndrome related disorders, including cardiovascular disorders and obesity in a subject.

[0339] Assays for testing the activity of a GLP-1 and/or a GLP-1R agonist of Table 10 or a glucagon-like peptide 1 receptor are well known to one of ordinary skill in the art. For example, glucose and insulin levels can be assessed by drawing plasma samples from subjects previously administered intravenous infusions of the glucagon- like peptide 1 as described in Kjems, et al., Diabetes, 52:380-386 (2003), the entire contents of which are expressly incorporated herein by reference. Briefly, plasma samples from a subject are treated with heparin and sodium fluoride, centrifuged, and plasma glucose levels measured by a glucose oxidase technique. Likewise, the plasma insulin concentrations are measured by a two-site insulin enzyme linked immunosorbent method. Alternatively, baby hamster kidney cells can be used to assay structure-activity relationships of glucagon-like peptide 1 derivatives (see, for example, Knudsen et al., J. Med. Chem., 43:1664-1669 (2000), the entire contents of which are expressly incorporated herein by reference). The present disclosure encompasses genes encoding a GLP-1 and/or a GLP-1R agonist of Table 10 comprising amino acids in its sequence that are substantially the same as an amino acid sequence described herein.

[0340] In some embodiments, the gene encoding a GLP-1 and/or a GLP-1R agonist of Table 10 is mutagenized; mutants exhibiting increased activity are selected; and the mutagenized gene encoding the GLP-1 and/or a GLP-1R agonist of Table 10 is isolated and inserted into the bacterial cell of the disclosure. The gene comprising the modifications described herein may be present on a plasmid or chromosome.

[0341] In one embodiment, the gene encoding the glucagon-like peptide 1 is from Homo sapiens. In one embodiment, the gene encoding the glucagon-like peptide 1 is from Lactobacillus spp. In one embodiment, the Lacotbacillus spp. is Lactobacillus plantarum WCFS1, Lactobacillus plantarum 80, Lactobacillus johnsonii NCC533, Lactobacillus johnsonii 100-100, Lactobacillus acidophilus NCFM ATCC700396, Lactobacillus brevis ATCC 367, Lactobacillus gasseri ATCC 33323, or Lactobacillus acidophilus. In another embodiment, the gene encoding the glucagon-like peptide 1 is from a Bifidobacterium spp. In one embodiment, the Bifidobacterium spp. is Bifidobacterium longum NCC2705, Bifidobacterium longum DJ010A, Bifidobacterium longum BB536, or Bifidobacterium longum SBT2928. In another embodiment, the gene encoding the glucagon-like peptide 1 is from Bacillus spp. In one embodiment, the Bacillus spp is Bacillus subtilis, or Bacillus licheniformis, or Bacillus lentus, or Bacillus brevis, or Bacillus stearothermophilus, or Bacillus alkalophilus, or Bacillus amyloliquefaciens, or Bacillus coagulans, or Bacillus circulans, or Bacillus lautus. In another embodiment, the gene encoding the glucagon-like peptide 1 is from Streptomyces spp. In one embodiment, the Streptomyces spp. is Streptomyces lividans. Other genes encoding glucagon-like peptide 1 are well-known to one of ordinary skill in the art and described in, for example, MacDonald, et al., Diabetes, 51(supp. 3):S434-S442 (2002) and WO1995/017510.

[0342] In one embodiment, the gene encoding the glucagon-like peptide 1 has at least about 80% identity with a nucleic acid sequence encoding SEQ ID NO: 71 or SEQ ID NO: 72. In another embodiment, the gene encoding the glucagon-like peptide 1 has at least about 85% identity with a nucleic acid sequence encoding SEQ ID NO: 71 or SEQ ID NO: 72. In one embodiment, the gene encoding the glucagon-like peptide 1 has at least about 90% identity with a nucleic acid sequence encoding SEQ ID NO: 71 or SEQ ID NO: 72. In one embodiment, the gene encoding the glucagon-like peptide 1 has at least about 95% identity with a nucleic acid sequence encoding SEQ ID NO: 71 or SEQ ID NO: 72. In another embodiment, the gene encoding the glucagon-like peptide 1 has at least about 96%, 97%, 98%, or 99% identity with a nucleic acid sequence encoding SEQ ID NO: 71 or SEQ ID NO: 72. Accordingly, in one embodiment, the gene encoding the glucagon-like peptide 1 has at least about 80%, 81%, 82%, 83%, 84%, 85%, 86%, 87%, 88%, 89%, 90%, 91%, 92%, 93%, 94%, 95%, 96%, 97%, 98%, or 99% identity with a nucleic acid sequence encoding SEQ ID NO:40. In another embodiment, the gene encoding the glucagon-like peptide 1 comprises a nucleic acid sequence encoding SEQ ID NO: 71 or SEQ ID NO: 72. In yet another embodiment the gene encoding the glucagon-like peptide 1 consists of a nucleic acid sequence encoding SEQ ID NO: 71 or SEQ ID NO: 72.

[0343] In one embodiment, the gene encoding the glucagon-like peptide 1 is directly operably linked to a first promoter. In another embodiment, the gene encoding the glucagon-like peptide 1 is indirectly operably linked to a first promoter. In one embodiment, the gene encoding the glucagon-like peptide 1 is operably linked to a promoter that it is not naturally linked to in nature.

[0344] In some embodiments, the gene encoding the glucagon-like peptide 1 is expressed under the control of a constitutive promoter. In another embodiment, the gene encoding the glucagon-like peptide 1 is expressed under the control of an inducible promoter. In some embodiments, the gene encoding the glucagon-like peptide 1 is expressed under the control of a promoter that is directly or indirectly induced by exogenous environmental conditions. In one embodiment, the gene encoding the glucagon-like peptide 1 is expressed under the control of a promoter that is directly or indirectly induced by low-oxygen or anaerobic conditions, wherein expression of the gene encoding the glucagon-like peptide 1 is activated under low-oxygen or anaerobic environments, such as the environment of the mammalian gut. In one embodiment, the gene encoding the glucagon-like peptide 1 is expressed under the control of a promoter that is directly or indirectly induced in the presence of certain molecules or metabolites, in the presence of molecules or metabolites associated with liver damage, inflammation or an inflammatory response, or in the presence of some other metabolite that may or may not be present in the gut, such as arabinose. Inducible promoters are described in more detail infra.

[0345] The gene encoding the glucagon-like peptide 1 may be present on a plasmid or chromosome in the bacterial cell. In one embodiment, the gene encoding the glucagon-like peptide 1 is located on a plasmid in the bacterial cell. In another embodiment, the gene encoding the glucagon-like peptide 1 is located in the chromosome of the bacterial cell. In yet another embodiment, a native copy of the gene encoding the glucagon-like peptide 1 is located in the chromosome of the bacterial cell, and a second gene encoding a second glucagon-like peptide 1 is located on a plasmid in the bacterial cell. In yet another embodiment, a native copy of the gene encoding the glucagon-like peptide 1 is located on a plasmid in the bacterial cell, and a second gene encoding a second glucagon-like peptide 1 is located on a plasmid in the bacterial cell. In yet another embodiment, a native copy of the gene encoding the glucagon-like peptide 1 is located in the chromosome of the bacterial cell, and a second gene encoding a second glucagon-like peptide 1 is located in the chromosome of the bacterial cell.

[0346] In some embodiments, the gene encoding the glucagon-like peptide 1 is expressed on a low-copy plasmid. In some embodiments, the gene encoding the glucagon-like peptide 1 is expressed on a high-copy plasmid. In some embodiments, the high-copy plasmid may be useful for increasing expression of the glucagon-like peptide 1, thereby reducing the degree of lipotoxic metabolites, pro-inflammatory substrate, and hepatic lipid deposition prevalent to those suffering from non-alcoholic steatohepatitis.

[0347] In one embodiment, the genetically engineered bacteria comprise a gene cassette encoding GLP-1 (1-37), or a functional fragment or variant thereof. In one embodiment, the genetically engineered bacteria comprise a gene cassette encoding SEQ ID NO: 73. In one embodiment, the genetically engineered bacteria comprise a gene cassette encoding GLP-1 (1-37) H->M substitution), or a functional fragment or variant thereof. In one embodiment, the genetically engineered bacteria comprise a gene cassette encoding SEQ ID NO: 74. In one embodiment, the genetically engineered bacteria comprise a gene cassette encoding GLP-1-(7-37), or a functional fragment or variant thereof. In one embodiment, the genetically engineered bacteria comprise a gene cassette encoding SEQ ID NO: 75. In one embodiment, the genetically engineered bacteria comprise a gene cassette encoding GLP-1-(7-36), or a functional fragment or variant thereof. In one embodiment, the genetically engineered bacteria comprise a gene cassette encoding SEQ ID NO: 76.

[0348] In one embodiment, the genetically engineered bacteria comprise a gene cassette encoding glucagon preproprotein (NP_002045.1), or a functional fragment or variant thereof. In one embodiment, the genetically engineered bacteria comprise a gene cassette encoding Proglucagon, or a functional fragment or variant thereof. In one embodiment, the genetically engineered bacteria comprise a gene cassette encoding SEQ ID NO: 78. In one embodiment, the genetically engineered bacteria comprise a gene cassette encoding Glucagon, or a functional fragment or variant thereof. In one embodiment, the genetically engineered bacteria comprise a gene cassette encoding SEQ ID NO: 79. In one embodiment, the genetically engineered bacteria comprise a gene cassette encoding Glicentin), or a functional fragment or variant thereof. In one embodiment, the genetically engineered bacteria comprise a gene cassette encoding SEQ ID NO: 80 In one embodiment, the genetically engineered bacteria comprise a gene cassette encoding Glicentin related peptide), or a functional fragment or variant thereof. In one embodiment, the genetically engineered bacteria comprise a gene cassette encoding SEQ ID NO: 81. In one embodiment, the genetically engineered bacteria comprise a gene cassette encoding Oxyntomodulin. In one embodiment, the genetically engineered bacteria comprise a gene cassette encoding SEQ ID NO: 82.

[0349] In one embodiment, one or more polypeptides encoded by the butyrate circuits and expressed by the genetically engineered bacteria have at least about 80% identity with one or more of SEQ ID NO: 73 through SEQ ID NO: 82. In another embodiment, one or more polypeptides encoded by the butyrate circuits and expressed by the genetically engineered bacteria have at least about 85% identity with with one or more of SEQ ID NO: 73 through SEQ ID NO: 82. In one embodiment, one or more polypeptides encoded by the butyrate circuits and expressed by the genetically engineered bacteria have at least about 90% identity with with one or more of SEQ ID NO: 73 through SEQ ID NO: 82. In one embodiment, one or more polypeptides encoded by the butyrate circuits and expressed by the genetically engineered bacteria have at least about 95% identity with with one or more of SEQ ID NO: 73 through SEQ ID NO: 82. In another embodiment, one or more polypeptides encoded by the butyrate circuits and expressed by the genetically engineered bacteria have at least about 96%, 97%, 98%, or 99% identity with with one or more of SEQ ID NO: 73 through SEQ ID NO: 82. Accordingly, in one embodiment, one or more polypeptides encoded by the butyrate circuits and expressed by the genetically engineered bacteria have at least about 80%, 81%, 82%, 83%, 84%, 85%, 86%, 87%, 88%, 89%, 90%, 91%, 92%, 93%, 94%, 95%, 96%, 97%, 98%, or 99% identity with with one or more of SEQ ID NO: 62 through SEQ ID NO: 70, and SEQ ID NO: 41. In another embodiment, one or more polypeptides encoded by the butyrate circuits and expressed by the genetically engineered bacteria one or more polypeptides encoded by the butyrate circuits and expressed by the genetically engineered bacteria comprise the sequence of with one or more of SEQ ID NO: 73 through SEQ ID NO: 82. In yet another embodiment one or more polypeptides encoded by the butyrate circuits and expressed by the genetically engineered bacteria consist of the sequence of with one or more of SEQ ID NO: 73 through SEQ ID NO: 82.

[0350] In embodiments, the pro-glucagon derived polypeptides, GLP-1 polypeptides, GLP-1 analogs described herein, and functional variants or fragments thereof are secreted. In some embodiments, the genetically engineered bacteria comprise one or more cassettes encoding pro-glucagon derived polypeptides, GLP-1 polypeptides, GLP-1 analogs, and/or functional variants or fragments and a secretion gene cassette and/or mutations generating a leaky phenotype. In some embodiments, a flagellar type III secretion pathway is used to secrete pro-glucagon derived polypeptides, GLP-1 polypeptides, and/or GLP-1 analogs described herein. In some embodiments, a Type V Autotransporter Secretion System is used to secrete pro-glucagon derived polypeptides, GLP-1 polypeptides, and/or GLP-1 analogs described herein. In some embodiments, a Hemolysin-based Secretion System is used to secrete the pro-glucagon derived polypeptides, GLP-1 polypeptides, and/or GLP-1 analogs described herein.. In alternate embodiments, the genetically engineered bacteria expressing the pro-glucagon derived polypeptides, GLP-1 polypeptides, and/or GLP-1 analogs described herein further comprise a non-native single membrane-spanning secretion system. As described herein. In some embodiments, the engineered bacteria expressing the pro-glucagon derived polypeptides, GLP-1 polypeptides, and/or GLP-1 analogs described herein. have one or more deleted or mutated membrane genes to generate a leaky phenotype as described herein.

[0351] In one embodiment, the genetically engineered bacteria comprise a gene cassette encoding Exenatide, or a functional fragment or variant thereof. In one embodiment, the genetically engineered bacteria comprise a gene cassette encoding SEQ ID NO: 83.

[0352] In one embodiment, the genetically engineered bacteria comprise a gene cassette encoding Liraglutide, or a functional fragment or variant thereof. In one embodiment, the genetically engineered bacteria comprise a gene cassette encoding SEQ ID NO: 84. In one embodiment, the genetically engineered bacteria comprise a gene cassette encoding Lixisenatide, or a functional fragment or variant thereof. In one embodiment, the genetically engineered bacteria comprise a gene cassette encoding SEQ ID NO: 85. In one embodiment, the genetically engineered bacteria comprise a gene cassette encoding Albiglutide, or a functional fragment or variant thereof. In one embodiment, the genetically engineered bacteria comprise a gene cassette encoding SEQ ID NO: 86. In one embodiment, the genetically engineered bacteria comprise a gene cassette encoding Dulaglutide, or a functional fragment or variant thereof. In one embodiment, the genetically engineered bacteria comprise a gene cassette encoding SEQ ID NO: 87. In one embodiment, the genetically engineered bacteria comprise a gene cassette encoding Taspoglutide, or a functional fragment or variant thereof. In one embodiment, the genetically engineered bacteria comprise a gene cassette encoding

[0353] SEQ ID NO: 88. In one embodiment, the genetically engineered bacteria comprise a gene cassette encoding Semaglutide, or a functional fragment or variant thereof. In one embodiment, the genetically engineered bacteria comprise a gene cassette encoding SEQ ID NO: 89.

[0354] In one embodiment, one or more polypeptides encoded by the and expressed by the genetically engineered bacteria have at least about 80% identity with one or more of SEQ ID NO: 83 through SEQ ID NO: 89. In another embodiment, one or more polypeptides encoded by the propionate circuits and expressed by the genetically engineered bacteria have at least about 85% identity with one or more of SEQ ID NO: 83 through SEQ ID NO: 89. In one embodiment, one or more polypeptides encoded by the propionate circuits and expressed by the genetically engineered bacteria have at least about 90% identity with with one or more of SEQ ID NO: 83 through SEQ ID NO: 89. In one embodiment, one or more polypeptides encoded by the propionate circuits and expressed by the genetically engineered bacteria have at least about 95% identity with with one or more of SEQ ID NO: 83 through SEQ ID NO: 89. In another embodiment, one or more polypeptides encoded by the propionate circuits and expressed by the genetically engineered bacteria have at least about 96%, 97%, 98%, or 99% identity with with one or more of SEQ ID NO: 83 through SEQ ID NO: 89. Accordingly, in one embodiment, one or more polypeptides encoded by the propionate circuits and expressed by the genetically engineered bacteria have at least about 80%, 81%, 82%, 83%, 84%, 85%, 86%, 87%, 88%, 89%, 90%, 91%, 92%, 93%, 94%, 95%, 96%, 97%, 98%, or 99% identity with with one or more of SEQ ID NO: 83 through SEQ ID NO: 89. In another embodiment, one or more polypeptides encoded by the propionate circuits and expressed by the genetically engineered bacteria one or more polypeptides encoded by the propionate circuits and expressed by the genetically engineered bacteria comprise the sequence of with one or more of SEQ ID NO: 83 through SEQ ID NO: 89. In yet another embodiment one or more polypeptides encoded by the propionate circuits and expressed by the genetically engineered bacteria consist of the sequence of with one or more of SEQ ID NO: 83 through SEQ ID NO: 89.

### IL-22

[0355] In some embodiments, the genetically engineered bacteria are capable of producing IL-22. Interleukin 22 (IL-22) cytokine can be produced by dendritic cells, lymphoid tissue inducer-like cells, natural killer cells and expressed on adaptive lymphocytes. Through initiation of Jak-STAT signaling pathways, IL-22 expression can trigger expression of antimicrobial compounds as well as a range of cell growth related pathways, both of which enhance tissue repair mechanisms. IL-22 is critical in promoting intestinal barrier fidelity and healing, while modulating inflammatory states. Murine models have demonstrated improved intestinal inflammation states following administration of 11-22. Additionally, IL-22 activates STAT3 signaling to promote enhanced mucus production to preserve barrier function.

[0356] As described by Wang et al, (Interleukin-22 alleviates metabolic disorders and restores mucosal immunity in diabetes, Nature 514, 237-241 (9 Oct. 2014)) mice which are deficient in IL-22 receptor and are fed a high-fat diet have a propensity to the development of metabolic disorders. Moreover, Wang et al found that administration of exogenous IL-22 in genetically obese leptin-receptor-deficient (db/db) mice and mice fed with high-fat diet reverses many of the metabolic symptoms, including hyperglycaemia and insulin resistance. These results indicate that IL-22 shows metabolic benefits, from positively affecting insulin sensitivity to the preservation of gut barreier integrity. IL-22 further affects endocrine functions, decreases endotoxaemia and chronic inflammation, and regulates lipid metabolism in liver and adipose tissues.

### Bile Salts

[0357] Bile salts (also called conjugated bile acids) are cholesterol derivatives synthesized in the liver which comprise a steroid ring component conjugated with either taurine (taurocholic acid; TCA) or glycine (glycochenodeoxycholic acid; GCDCA). Bile salts act as signaling molecules to regulate systemic endocrine functions, including triglyceride, cholesterol, and glucose homeostasis (Houten et al., EMBO J., 25:1419-1425 (2006) and Watanabe et al., Nature, 439:484-489 (2006)). Specifically, bile acids trigger cellular farnesoid X receptor (FXR)- and G-protein coupled receptor (TGR4)-mediated host responses. Additionally, bile salts have been shown to facilitate lipid absorption and repress bacterial cell growth in the small intestine, thereby influencing both host metabolic pathways and the microflora present in the gut (Jones et al., PNAS, 105(36):13580-13585 (2008) and Ridlon et al., J. Lipid Research, 47(2):241-259 (2006)).

[0358] Bile salts are stored in the gallbladder and then subsequently released into the duodenum via the common bile duct. In the small intestine, microbial bile salt hydrolase (BSH) enzymes remove the glycine or taurine molecules, a process referred to as deconjugation, to produce the primary bile acids cholic acid (CA) and chenodeoxycholic acid (CDCA). In the gut, bile acids are reabsorbed within the terminal ileum, while non-reabsorbed bile acids enter the large intestine. Once in the large intestine, bile acids are amenable to further modification by microbial 7α-dehydroxylase enzymes to yield secondary bile acids, such as deoxycholic acid (DCA) and lithocholic acid (LCA) (Joyce et al., Gut Microbes, 5(5):669-674 (2014); Bhowmik et al., Accepted Article, doi:10.1002/prot.24971 (2015)).

[0359] It has been shown that bile salt metabolism is involved in host physiology (Ridlon et al., Current Opinion Gastroenterol., 30(3):332 (2014) and Jones et al., 2008). For example, it is known that the expression of bile salt hydrolase enzymes functionally regulates host lipid metabolism and play a role in cholesterol metabolism and transport, circadian rhythm, gut homeostasis/barrier function, weight gain, adiposity, and possibly gastrointestinal cancers in the host (Joyce et al., PNAS, 111(20):7421-7426 (2014); Zhou and Hylemon, Steroids, 86:62-68, (2014); Mitchell et al., Expert Opinion Biolog. Therapy, 13(5):631-642 (2013); and WO14/198857, the entire contents of each of which are expressly incorporated herein by reference). Specifically, potential effects of bile salt hydrolase-expressing bacteria on cholesterol metabolic pathways have been shown to upregulate the ATP binding cassette A1 (ABCA1), the ATP binding cassette G1 (ABCG1), the ATP binding cassette G5/G8 (ABCGS/G8), cholesterol 7 alpha-hydroxylase (CYP7A1), and liver X receptor (LXR), and to downregulate farnesoid X receptor (FXR), Niemann-Pick C1-like 1 (NPC1L1), and small heterodimer partner (SHP), which impacts cholesterol efflux, plasma HDL-C levels, biliary excretion, cholesterol catabolism, bile acid synthesis, cholesterol levels, and decreased intestinal cholesterol absorption, among other effects (Mitchel et al. (2014) and Zhou and Hylemon (2014)). Additionally, bile salt hydrolase activity has been shown to impact bile detoxification, gastrointestinal persistence, nutrition, membrane alterations, altered digestive functions (lipid malabsorption, weight loss), cholesterol lowering, cancer, and formation of gallstones (see Begley et al., Applied and Environmental Microbiology, 72(3):1729-1738 (2006)). Moreover, a Clostridium scindens bacterium expressing a 7α-dehydroxylase enzyme has been shown to produce resistance to C. difficile infection in hosts (Buffie et al., Nature, 517:205-208 (2015), and bile salt metabolism has been shown to play a role in both regulating the microbiome as well as in cirrhosis (Ridlon et al., Gut Microbes, 4(5):382-387 (2013) and Kakiyama et al., J. Hepatol., 58(5):949-955 (2013)). Thus, a need exists for treatments which address the metabolism of bile salts in subjects in order to treat and prevent diseases and disorders in which bile salts play a role, such as cardiovascular disease, metabolic disease, cirrhosis, gastrointestinal cancer, and C. difficile infection.

[0360] As used herein, the term “bile salt” or “conjugated bile acid” refers to a cholesterol derivative that is synthesized in the liver and consists of a steroid ring component that is conjugated with either glycine (glycochenodeoxycholic acid; GCDCA) or taurine (taurocholic acid; TCA). Bile salts are stored in the gallbladder and then subsequently released into the duodenum. Bile salts act as signaling molecules to regulate systemic endocrine functions including triglyceride, cholesterol, and glucose homeostasis, and also facilitate lipid absorption. In the small intestine, microbial bile salt hydrolase (BSH) enzymes remove the glycine or taurine molecules to produce bile acids.

[0361] As used herein, the term “bile acid” or “unconjugated bile acid” refers to cholic acid (CA) or chenodeoxycholic acid (CDCA). In the gut, bile acids are reabsorbed within the terminal ileum, while non-reabsorbed bile acids enter the large intestine. In the large intestine, bile acids are amenable to further modification by microbial 7α-dehydroxylase enzymes to yield secondary bile acids, such as deoxycholic acid (DCA) and lithocholic acid (LCA). As used herein, the term “catabolism” refers to the processing, breakdown and/or degradation of a metabolite or a complex molecule, such as tryptophan or a bile salt, into compounds that are non-toxic or which can be utilized by the bacterial cell or can be exported inot the extracellular environment, where these compounds may function as effectors.

[0362] In one embodiment, the term “bile salt catabolism” refers to the processing, breakdown, and/or degradation of bile salts into unconjugated bile acid(s). In one embodiment, “abnormal catabolism” refers to any condition(s), disorder(s), disease(s), predisposition(s), and/or genetic mutations(s) that result in increased levels of bile salts. In one embodiment, “abnormal catabolism” refers to an inability and/or decreased capacity of a cell, organ, and/or system to process, degrade, and/or secrete bile salts. In healthy adult humans, 600 mg of bile salts are secreted daily. In one embodiment, said inability or decreased capacity of a cell, organ, and/or system to process and/or degrade bile salts is caused by the decreased endogenous deconjugation of bile salts, e.g., decreased endogenous deconjugation of bile salts into bile acids by the intestinal microbiota in the gut. In one embodiment, the inability or decreased capacity of a cell, organ, and/or system to process and/or degrade bile salts results from a decrease in the number of or activity of intestinal bile salt hydrolase (BSH)-producing microorganisms.

[0363] In one embodiment, a “disease associated with bile salts” or a “disorder associated with bile salts” is a disease or disorder involving the abnormal, e.g., increased, levels of bile salts in a subject. Alternatively, a disease or disorder associated with bile salts is a disease or disorder wherein a subject exhibits normal levels of bile salts, but wherein the subject would benefit from decreased levels of bile salts. Bile salts function to solubilize dietary fat and enable its absorption into host circulation, and healthy adult humans secrete about 600 mg of bile salts daily through the stool. Thus, decreasing increased levels of bile salts, or normal levels of bile salts, in a subject would result in less uptake of dietary fat, causing the subject's liver to pull cholesterol from systemic circulation as it attempts to synthesize more. Thus, in one embodiment, a subject having a disease or disorder associated with bile salts secretes about 600 mg of bile salts in their stool daily. In another embodiment, a subject having a disease or disorder associated with bile salts secretes more than 600 mg, 700 mg, 800 mg, 900 mg, or 1 g of bile salts in their stool daily.In one embodiment, a disease or disorder associated with bile salts is a cardiovascular disease. In another embodiment, a disease or disorder associated with bile salts is a metabolic disease. In another embodiment, a disease or disorder associated with bile salts is a liver disease, such as cirrhosis, nonalcoholic steatohepatitis (NASH), or progressive familialintrahepatic cholestasis type 2 (PFIC2).

[0364] As used herein, the terms “cardiovascular disease” or “cardiovascular disorder” are terms used to classify numerous conditions affecting the heart, heart valves, and vasculature (e.g., veins and arteries) of the body, and encompasses diseases and conditions including, but not limited to hypercholesterolemia, diabetic dyslipidemia, hypertension, arteriosclerosis, atherosclerosis, myocardial infarction, acute coronary syndrome, angina, congestive heart failure, aortic aneurysm, aortic dissection, iliac or femoral aneurysm, pulmonary embolism, primary hypertension, atrial fibrillation, stroke, transient ischemic attack, systolic dysfunction, diastolic dysfunction, myocarditis, atrial tachycardia, ventricular fibrillation, endocarditis, arteriopathy, vasculitis, atherosclerotic plaque, vulnerable plaque, acute coronary syndrome, acute ischemic attack, sudden cardiac death, peripheral vascular disease, coronary artery disease (CAD), peripheral artery disease (PAD), and cerebrovascular disease. As used herein, a subject having “hypercholesterolemia” may have a total cholesterol of greater than 4 mmol/L, and a low-density lipoprotein cholesterol (LDL) of greater than 3mmol/L.

[0365] As used herein, the term “bile salt hydrolase” enzyme refers to an enzyme involved in the cleavage of the amino acid sidechain of glycol- or tauro-conjugated bile acids to generate unconjugated bile acids (FIG. 2). Bile salt hydrolase (BSH) enzymes are well known to those of skill in the art. For example, bile salt hydrolase activity has been detected in Lactobacillus spp., Bifidobacterium spp., Enterococcus spp., Clostridum spp., Bacteroides spp., Methanobrevibacter spp., and Listeria spp. See, for example, Begley et al., Applied and Environmental Microbiology, 72(3):1729-1738 (2006); Jones et al., Proc. Natl. Acad. Sci., 105(36):13580-13585 (2008); Ridlon et al., J. Lipid Res., 47(2):241-259 (2006); and WO2014/198857, the entire contents of each of which are expressly incorporated herein by reference.

### Bile Salt Hydrolases

[0366] The bacterial cells described herein comprise a heterologous gene encoding a bile salt hydrolase enzyme and are capable of deconjugating bile salts into unconjugated bile acids (see FIG. 27 and FIG. 28).

[0367] In one embodiment, the bile salt hydrolase enzyme increases the rate of bile salt catabolism in the cell. In one embodiment, the bile salt hydrolase enzyme decreases the level of bile salts in the cell or in the subject. In one embodiment, the bile salt hydrolase enzyme decreases the level of taurocholic acid (TCA) in the cell or in the subject. In one embodiment, the bile salt hydrolase enzyme decreases the level of glycochenodeoxycholic acid (GCDCA) in the cell or in the subject. Methods for measuring the rate of bile salt catabolism and the level of bile salts and bile acids are well known to one of ordinary skill in the art. For example, bile salts and acids may be extracted from a sample, and standard LC/MS methods may be used to determine the rate of bile salt catabolism and/or level of bile salts and bile acids.

[0368] In another embodiment, the bile salt hydrolase enzyme increases the level of bile acids in the cell or in the subject as compared to the level of bile salts in the cell or in the subject. In another embodiment, the bile salt hydrolase enzyme increases the level of cholic acid (CA) in the cell. In another embodiment, the bile salt hydrolase enzyme increases the level of chenodeoxycholic acid (CDCA) in the cell.

[0369] Enzymes involved in the catabolism of bile salts may be expressed or modified in the bacteria of the disclosure in order to enhance catabolism of bile salts. Specifically, when a bile salt hydrolase enzyme is expressed in the recombinant bacterial cells of the disclosure, the bacterial cells convert more bile salts into unconjugated bile acids when the bile salt hydrolase enzyme is expressed than unmodified bacteria of the same bacterial subtype under the same conditions. In another embodiment, when a bile salt hydrolase enzyme is expressed in the recombinant bacterial cells of the disclosure, the bacterial cells convert more bile salts, such as TCA or GCDCA, into CA and CDCA when the bile salt hydrolase enzyme is expressed than unmodified bacteria of the same bacterial subtype under the same conditions. Thus, the genetically engineered bacteria comprising a heterologous gene encoding a bile salt hydrolase enzyme can catabolize bile salts to treat disorders associated with bile salts, including cardiovascular diseases, metabolic diseases, liver disease, such as cirrhosis or NASH, gastrointestinal cancers, and C. difficile infection.

[0370] In one embodiment, the bacterial cell comprises a heterologous gene encoding a bile salt hydrolase enzyme. In some embodiments, the disclosure provides a bacterial cell that comprises a heterologous gene encoding a bile salt hydrolase enzyme operably linked to a first promoter. In one embodiment, the first promoter is an inducible promoter. In one embodiment, the bacterial cell comprises a gene encoding a bile salt hydrolase enzyme from a different organism, e.g., a different species of bacteria. In another embodiment, the bacterial cell comprises more than one copy of a native gene encoding a bile salt hydrolase enzyme. In yet another embodiment, the bacterial cell comprises at least one native gene encoding a bile salt hydrolase enzyme, as well as at least one copy of a gene encoding a bile salt hydrolase enzyme from a different organism, e.g., a different species of bacteria. In one embodiment, the bacterial cell comprises at least one, two, three, four, five, or six copies of a gene encoding a bile salt hydrolase enzyme. In one embodiment, the bacterial cell comprises multiple copies of a gene or genes encoding a bile salt hydrolase enzyme.

[0371] Multiple distinct bile salt hydrolase enzymes are known in the art. In some embodiments, bile salt hydrolase enzyme is encoded by a gene encoding a bile salt hydrolase enzyme derived from a bacterial species. In some embodiments, a bile salt hydrolase enzyme is encoded by a gene encoding a bile salt hydrolase enzyme derived from a non-bacterial species. In some embodiments, a bile salt hydrolase enzyme is encoded by a gene derived from a eukaryotic species, e.g., fungi. In one embodiment, the gene encoding the bile salt hydrolase enzyme is derived from an organism of the genus or species that includes, but is not limited to, Lactobacillus spp., such as Lactobacillus plantarum, Lactobacillus johnsonii, Lactobacillus acidophilus, Lactobacillus brevis, or Lactobacillus gasseri; Bifidobacterium spp., such as Bifidobacterium longum, Bifidobacterium bifidum, or Bifidobacterium adolescentis; Bacteroides spp., such as Bacteroides fragilis or Bacteroides vlugatus; Clostridium spp., such as Clostridium perfringens; Listeria spp., such as Listeria monocytogenes, Enterococcus spp., such as Enterococcus faecium or Enterococcus faecalis; Brucella spp., such as Brucella abortus; Methanobrevibacter spp., such as Methanobrevibacter smithii, Staphylococcus spp., such as Staphylococcus aureus, Mycobacterium spp., such as Mycobacterium tuberculosis; Salmonella spp., such as Salmonella enterica; Listeria spp., such as Listeria monocytogenes.

[0372] In one embodiment, the gene encoding the bile salt hydrolase enzyme has been codon-optimized for use in the recombinant bacterial cell. In one embodiment, the gene encoding the bile salt hydrolase enzyme has been codon-optimized for use in Escherichia coli. In another embodiment, the gene encoding the bile salt hydrolase enzyme has been codon-optimized for use in Lactococcus. When the gene encoding the bile salt hydrolase enzyme is expressed in the recombinant bacterial cells, the bacterial cells catabolize more bile salt than unmodified bacteria of the same bacterial subtype under the same conditions (e.g., culture or environmental conditions). Thus, the genetically engineered bacteria comprising a heterologous gene encoding a bile salt hydrolase enzyme may be used to catabolize excess bile salts to treat a disorder associated with bile salts, such as cardiovascular disease, metabolic disease, liver disease, such as cirrhosis or NASH.

[0373] The present disclosure further comprises genes encoding functional fragments of a bile salt hydrolase enzyme or functional variants of a bile salt hydrolase enzyme. As used herein, the term “functional fragment thereof” or “functional variant thereof” of a bile salt hydrolase enzyme relates to an element having qualitative biological activity in common with the wild-type bile salt hydrolase enzyme from which the fragment or variant was derived. For example, a functional fragment or a functional variant of a mutated bile salt hydrolase enzyme is one which retains essentially the same ability to catabolize bile salts as the bile salt hydrolase enzyme from which the functional fragment or functional variant was derived. For example, a polypeptide having bile salt hydrolase enzyme activity may be truncated at the N-terminus or C-terminus and the retention of bile salt hydrolase enzyme activity assessed using assays known to those of skill in the art, including the exemplary assays provided herein. In one embodiment, the recombinant bacterial cell comprises a heterologous gene encoding a bile salt hydrolase enzyme functional variant. In another embodiment, the recombinant bacterial cell comprises a heterologous gene encoding a bile salt hydrolase enzyme functional fragment.

[0374] Assays for testing the activity of a bile salt hydrolase enzyme, a bile salt hydrolase enzyme functional variant, or a bile salt hydrolase enzyme functional fragment are well known to one of ordinary skill in the art. For example, bile salt catabolism can be assessed by expressing the protein, functional variant, or fragment thereof, in a recombinant bacterial cell that lacks endogenous bile salt hydrolase enzyme activity. Bile salt hydrolase activity can be assessed using a plate assay as described in Dashkevicz and Feighner, Applied Environ. Microbiol., 55:11-16 (1989) and Christiaens et al., Appl. Environ. Microbiol., 58:3792-3798 (1992), the entire contents of each of which are expressly incorporated herein by reference. Briefly, bacterial cultures that are grown overnight can be spotted onto LB bile agar supplemented with either 0.5% (wt/vol) TDCA, 0.5% (wt/vol) GDCA, or 3% (vol/vol) human bile. BSH activity can be indicated by halos of precipitated deconjugated bile acids (see, also, Jones et al., PNAS, 105(36):13580-13585 (2008), the entire contents of which are expressly incorporated herein by reference). A ninhydrine assay for free taurine has also been described (see, for example, Clarke et al., Gut Microbes, 3(3):186-202 (2012), the entire contents of which are expressly incorporated herein by reference. Alternatively, a mouse model can be used to assay bile salt and bile acid signatures in vivo (see, for example, Joyce et al., PNAS, 111(20):7421-7426 (2014), the entire contents of which are expressly incorporated herein by reference). The present disclosure encompasses genes encoding a bile salt hydrolase enzyme comprising amino acids in its sequence that are substantially the same as an amino acid sequence described herein.

[0375] In some embodiments, the gene encoding a bile salt hydrolase enzyme is mutagenized; mutants exhibiting increased activity are selected; and the mutagenized gene encoding the bile salt hydrolase enzyme is isolated and inserted into the bacterial cell of the disclosure. The gene comprising the modifications described herein may be present on a plasmid or chromosome.

[0376] In one embodiment, the gene encoding the bile salt hydrolase enzyme is from Lactobacillus spp. In one embodiment, the Lacotbacillus spp. is Lactobacillus plantarum WCFS1, Lactobacillus plantarum 80, Lactobacillus johnsonii NCC533, Lactobacillus johnsonii 100-100, Lactobacillus acidophilus NCFM ATCC700396, Lactobacillus brevis ATCC 367, Lactobacillus gasseri ATCC 33323, or Lactobacillus acidophilus. In another embodiment, the gene encoding the bile salt hydrolase enzyme is from a Bifidobacterium spp. In one embodiment, the Bifidobacterium spp. is Bifidobacterium longum NCC2705, Bifidobacterium longum DJO10A, Bifidobacterium longum BB536, Bifidobacterium longum SBT2928, Bifidobacterium bifidum ATCC 11863, or Bifidobacterium adolescentis. In another embodiment, the gene encoding the bile salt hydrolase enzyme is from Bacteroides spp. In one embodiment, the Bacteroides spp. is Bacteroides fragilis or Bacteroides vlugatus. In another embodiment, the gene encoding the bile salt hydrolase enzyme is from Clostridium spp. In one embodiment, the Clostridum spp. is Clostridum perfringens MCV 185 or Clostridum perfringens 13. In another embodiment, the gene encoding the bile salt hydrolase enzyme is from Listeria spp. In one embodiment, the Listeria spp. is Listeria monocytogenes. In one embodiment, the gene encoding the bile salt hydrolase enzyme is from Methanobrevibacter spp. In one embodiment, the Methanobrevibacter spp. is Methanobrevibacter smithii. Other genes encoding bile salt hydrolase enzymes are well-known to one of ordinary skill in the art and described in, for example, Jones et al., PNAS, 105(36):13580-13585 (2008) and WO2014/198857. Table 11A lists non-limiting examples of bile salt hydrolases.

TABLE 11A
Bile Salt Hydrolases

| Gene or Operon | Sequence |
|---|---|
| Bile salt hydrolase | ATGTGTACTGCCATAACTTATCAATCTTATAATAATTACTTC |
| from Lactobacillus | GGTAGAAATTTCGATTATGAAATTTCATACAATGAAATGGTT |
| plantarum | ACGATTACGCCTAGAAAATATCCACTAGTATTTCGTAAGGTG |
| SEQ ID NO: 90 | GAGAACTTAGATCACCATTATGCAATAATTGGAATTACTGCT |
| | GATGTAGAAAGCTATCCACTTTACTACGATGCGATGAATGAA |
| | AAAGGCTTGTGTATTGCGGGATTAAATTTTGCAGGTTATGCT |
| | GATTATAAAAAATATGATGCTGATAAAGTTAATATCACACCA |
| | TTTGAATTAATTCCTTGGTTATTGGGACAATTTTCAAGTGTT |
| | AGAGAAGTGAAAAAGAACATACAAAAACTAAACTTGGTTAAT |
| | ATTAATTITAGTGAACAATTACCATTATCACCGCTACATTGG |
| | TTGGTTGCTGATAAACAGGAATCGATAGTTATTGAAAGTGIC |
| | AAAGAAGGACTAAAAATTTACGACAATCCAGTAGGTGTGTTA |
| | ACAAACAATCCTAATTTTGACTACCAATTATTTAATTTGAAC |
| | AACTATCGTGCCTTATCAAATAGCACACCCCAAAATAGTITT |
| | TCGGAAAAAGTGGATTTAGATAGTTATAGTAGAGGAATGGGC |
| | GGACTAGGATTACCTGGAGACTTGTCCTCAATGICTAGATTT |
| | GTCAGAGCCGCTTTTACTAAATTAAACTCGTTGTCGATGCAG |
| | ACAGAGAGTGGCAGTGTTAGTCAGTTTTTCCATATACTAGGG |
| | TCTGTAGAACAACAAAAAGGGCTATGTGAAGTTACTGACGGA |
| | AAGTACGAATATACAATCTATTCTTCTTGTTGTGATATGGAC |
| | AAAGGAGTTTATTACTATAGAACTTATGACAATAGTCAAATT |
| | AACAGTGTCAGTTTAAACCATGAGCACTTGGATACGACTGAA |
| | TTAATTTCTTATCCATTACGATCAGAAGCACAATACTATGCA |
| | GTTAACTAA |
| Bile salt hydrolase | MCTAITYQSYNNYFGRNFDYEISYNEMVTITPRKYPLVFRKV |
| protein from | ENLDHHYAIIGITADVESYPLYYDAMNEKGLCIAGLNFAGYA |
| Lactobacillus | DYKKYDADKVNITPFELIPWLLGQFSSVREVKKNIQKLNLVN |
| plantarum | INFSEQLPLSPLHWLVADKQESIVIESVKEGLKIYDNPVGVL |
| SEQ ID NO: 91 | TNNPNFDYQLFNLNNYRALSNSTPQNSFSEKVDLDSYSRGMG |
| | GLGLPGDLSSMSRFVRAAFTKLNSLSMQTESGSVSQFFHILG |
| | SVEQQKGLCEVTDGKYEYTIYSSCCDMDKGVYYYRTYDNSQI |
| | NSVSLNHEHLDTTELISYPLRSEAQYYAVN |
| Bile salt hydrolase | ATGTGTACTGCTGCAAATTATTTAACAAAATGCCATTATTTT |
| from | GGCCGTAATTTTGACTATGAAATTTCATATAATGAAAGAGTA |
| Methanobrevibacter | ACGATAACTCCTAGAAACTATCCTTTAATATTCAGGGATACT |
| smithii 3142 | GAGGACATTGAAAATCATTATGGGATTATTGGCATAGCTGCA |
| SEQ ID NO: 92 | GGTATTGATGAATATCCTTTGTATTATGATGCATGTAATGAG |
| | AAAGGATTAGCTATGGGGGGATTAAACTTTCCGGATTACTGT |
| | GACTACAAACCACTAGATAAATCTAAAGTTAACATAGCTTCT |
| | TITGAGATTATTCCATATATATTATCTCAAGCAAAAACCATC |
| | AGTGATGCCGAAAGGTTATTGGAAAACTTAAATATTTCAGAT |
| | GAGAAATTTTCCGCCCAGTTGCCTCCATCTCCACTTCATTGG |
| | ATTATTTCAGATAGGAATGCTTCAATTGTTGTAGAGGTTGTA |
| | GAGGAAGGACTGGATATTTATGATAATCCTGTAGGAGTTITA |
| | ACAAACAACCCTCCTTTTGATAAACAGCTATTTAATTTAAAT |
| | AATTATATGGCATTATCAAACAGAACGCCTGAAAATACCTTT |
| | GGAGGCAATTTGGATTTGGCAACTTATAGTCGGGGAATGGGT |
| | TCAATTGGTCTTCCGGGGGATGTTTCTTCACAGTCCCGTTTT |
| | GTAAAAGCAGCTTTTGTTAAAGAAAATTCCGTTTCCGGAGAT |
| | TCTGAAAAAGAAAGTGTGTCTCAGTTTTTCCATATTCTGGCA |
| | TCTGTTGAACAGCAAAAAGGATGTACGTTAGTGGAAGAACCT |
| | GATAAATTTGAGTATACTATTTATTCAGACTGTTACAATACA |
| | GATAAGGGAATATTGTATTATAAAACATATGATGGTCCTCAA |
| | ACATCTGTTAATATACATGATGAGGATTTGGAAACCAATCAG |
| | TTAATTAATTTTGAGTTGGTTGATTAA |
| Bile salt hydrolase | MCTAANYLTKCHYFGRNFDYEISYNERVTITPRNYPLIFRDT |
| protein from | EDIENHYGIIGIAAGIDEYPLYYDACNEKGLAMGGLNFPDYC |
| Methanobrevibacter | DYKPLDKSKVNIASFEIIPYILSQAKTISDAERLLENLNISD |
| smithii 3142 | EKFSAQLPPSPLHWIISDRNASIVVEVVEEGLDIYDNPVGVL |
| SEQ ID NO: 93 | TNNPPFDKQLFNLNNYMALSNRTPENTFGGNLDLATYSRGMG |
| | SIGLPGDVSSQSRFVKAAFVKENSVSGDSEKESVSQFFHILA |
| | SVEQQKGCTLVEEPDKFEYTIYSDCYNTDKGILYYKTYDGPQ |
| | TSVNIHDEDLETNQLINFELVD |
| Bile salt hydrolase | ATGGTTATGAAAAAGATTTTGATAGCTTTGGCCTTATTGCTG |
| from Bacteroides | ACAGGCATTGCAAGCGGATCGGCATGTACCGGTATTTCATTC |
| vulgatus | CTCGCTGAAGATGGCGGATATGTGCAGGCACGTACTATAGAG |
| SEQ ID NO: 94 | TGGGGGAACAGTTATCTTCCGAGTGAATATGTTATTGTTCCC |
| | AGAGGACAGGATTTGGTATCTTATACTCCAACGGGTGTAAAT |
| | GGCTTGAGATTTCGGGCTAAATATGGTCTGGTAGGACTGGCT |
| | ATCATTCAGAAAGAGTTTGTGGCTGAAGGACTGAATGAAGTA |
| | GGGCTTTCGGCTGGATTGTTTTATTTTCCCCATTATGGGAAG |
| | TATGAAGAATATGATGAGGCTCAAAATGCAATTACTTTGTCG |
| | GATTTGCAGGTGGTGAACTGGATGCTTTCCCAATTTGCTACT |
| | ATAGACGAAGTGAGAGAAGCTATAGAAGGGGTGAAGGTGGTG |
| | TCTCTTGATAAACCTGGTAAAAGTTCTACGGTACATTGGCGC |
| | ATTGGCGATGCTAAAGGAAATCAAATGGTGTTGGAATTTGTA |
| | GGTGGTGTTCCTTATTTTTATGAAAATAAAGTAGGAGTACTC |
| | ACCAATTCTCCCGATTTTCCATGGCAGGTGATTAACTTGAAT |
| | AATTATGTAAATCTATATCCGGGAGCTGTCACTCCACAGCAA |
| | TGGGGTGGGGTGACTATTTTCCCTTTTGGCGCAGGTGCCGGA |
| | TTTCATGGTATTCCGGGGGATGTAACTCCTCCATCCCGTTTT |
| | GTTCGTGTAGCGTTTTATAAGGCAACAGCTCCGGTGTGTCCT |
| | ACAGCGTATGACGCTATATTACAAAGCTTTCATATCCTGAAT |
| | AATTTTGATATTCCTATTGGTATAGAATATGCGTTAGGGAAA |
| | GCACCTGATATTCCTAGTGCCACACAATGGACTTCGGCTATT |
| | GAITTGACAAACAGGAAAGTGTATTATAAAACAGCATACAAT |
| | AACAATATTCGTTGTATTAGTATGAAGAAGATTGATTTTGAT |
| | AAAGTGAAGTATCAGTCGTATCCATTGGATAAGGAGTTGAAA |
| | CAGCCTGTAGAAGAGATTATTGTGAAATAG |
| Bile salt hydrolase | MVMKKILIALALLLTGIASGSACTGISFLAEDGGYVQARTIE |
| protein from | WGNSYLPSEYVIVPRGQDLVSYTPTGVNGLRFRAKYGLVGLA |
| Bacteroides | IIQKEFVAEGLNEVGLSAGLFYFPHYGKYEEYDEAQNAITLS |
| vulgatus | DLQVVNWMLSQFATIDEVREAIEGVKVVSLDKPGKSSTVHWR |
| SEQ ID NO: 95 | IGDAKGNQMVLEFVGGVPYFYENKVGVLTNSPDFPWQVINLN |
| | NYVNLYPGAVTPQQWGGVTIFPFGAGAGFHGIPGDVTPPSRF |
| | VRVAFYKATAPVCPTAYDAILQSFHILNNFDIPIGIEYALGK |
| | APDIPSATQWTSAIDLTNRKVYYKTAYNNNIRCISMKKIDFD |
| | KVKYQSYPLDKELKQPVEEIIVK |
| Bile salt hydrolase | ATGTGCACTGGTGTCCGTTTCTCCGATGATGAGGGCAACAC |
| from | CTATTTCGGCCGTAATCTCGACTGGAGTTTCTCATATGGGG |
| Bifidobacterium | AGACCATCCTGGTTACTCCGCGCGGCTACCACTATGACACG |
| longum | GTGTTTGGTGCGGGCGGCAAGGCGAAGCCGAACGCGGTGAT |
| SEQ ID NO: 96 | CGGCGTGGGTGTGGTCATGGCCGATAGGCCGATGTATTTCG |
| | ACTGCGCCAATGAACATGGTCTGGCCATCGCCGGCTTGAAT |
| | TTCCCCGGCTACGCCTCGTTCGTCCACGAACCGGTCGAAGG |
| | CACGGAAAACGTCGCCACGTTCGAATTTCCGCTGTGGGTGG |
| | CGCGTAATTTCGACTCCGTCGACGAGGTCGAGGAGGCGCTC |
| | AGGAACGTGACGCTCGTCTCCCAGATCGTGCCGGGACAGCA |
| | GGAGTCTCTGCTGCACTGGTTCATCGGCGACGGCAAGCGCA |
| | GCATCGTCGTCGAGCAGATGGCCGATGGCATGCACGTGCAT |
| | CATGATGACGTCGATGTGCTGACCAATCAGCCGACGTTCGA |
| | CTTCCATATGGAAAACCTGCGCAACTACATGTGCGTCAGCA |
| | ACGAGATGGCCGAACCGACTTCATGGGGCAAGGCCTCCTTG |
| | ACCGCCTGGGGTGCGGGTGTGGGCATGCATGGCATCCCGGG |
| | CGACGTGAGTTCCCCGTCGCGCTTCGTTCGTGTGGCCTACA |
| | CCAACGCGCATTACCCGCAGCAGAACGATGAAGCCGCCAAT |
| | GTGTCGCGCCTGTTCCACACCCTCGGCTCCGTGCAGATGGT |
| | GGACGGCATGGCGAAGATGGGCGACGGCCAGTTCGAACGCA |
| | CGCTGTTCACCAGCGGATATTCGTCCAAGACCAACACCTAT |
| | TACATGAACACCTATGATGACCCCGCCATCCGTTCCTACGC |
| | CATGGCCGATTACGATATGGATTCCTCGGAGCTCATCAGCG |
| | TCGCCCGATGA |
| Bile salt hydrolase | MCTGVRFSDDEGNTYFGRNLDWSFSYGETILVTPRGYHYDTV |
| protein from | FGAGGKAKPNAVIGVGVVMADRPMYFDCANEHGLAIAGLNFP |
| Bifidobacterium | GYASFVHEPVEGTENVATFEFPLWVARNFDSVDEVEEALRNV |
| longum | TLVSQIVPGQQESLLHWFIGDGKRSIVVEQMADGMHVHHDDV |
| SEQ ID NO: 97 | DVLTNQPTFDFHMENLRNYMCVSNEMAEPTSWGKASLTAWGA |
| | GVGMHGIPGDVSSPSRFVRVAYTNAHYPQQNDEAANVSRLFH |
| | TLGSVQMVDGMAKMGDGQFERTLFTSGYSSKTNTYYMNTYDD |
| | PAIRSYAMADYDMDSSELISVAR |
| Bile salt hydrolase | ATGTGTACGTCAATAACTTATACAACGAAGGATCACTATTT |
| from Listeria | TGGAAGGAATTTCGATTATGAACTTTCTTACAAAGAAGTTG |
| monocytogenes | TGGTTGTTACGCCGAAAAATTACCCGTTCCATTTTCGCAAG |
| SEQ ID NO: 98 | GTAGAGGATATAGAGAAGCATTATGCACTTATTGGTATTGC |
| | TGCTGTGATGGAAAACTACCCGTTGTATTACGATGCTACCA |
| | ATGAAAAAGGCCTTAGTATGGCAGGACTCAATTTCTCAGGA |
| | AATGCGGATTACAAGGATTTTGCAGAAGGTAAGGACAATGT |
| | GACCCCCTTTGAATTTATTCCGTGGATTCTTGGTCAATGCG |
| | CTACTGTAAAAGAAGCAAGAAGATTACTTCAGAGAATCAAT |
| | CTCGTGAATATTAGTTTTAGTGAAAATTTACCGCTGTCTCC |
| | ATTACATTGGTTGATGGCTGATCAAACAGAATCTATTGTAG |
| | TGGAATGTGTGAAAGATGGACTTCACATTTATGATAATCCT |
| | GTTGGCGTGTTAACAAATAATCCAACATTTGATTACCAACT |
| | ATTTAATTTAAACAATTATCGCGTTCTTTCGAGTGAAACCC |
| | CAGAAAATAATTTTTCCAAAGAGATTGATTTGGATGCTTAT |
| | AGTCGTGGGATGGGCGGAATTGGCTTACCTGGTGATTTATC |
| | TTCTATGTCTCGTTTTGTGAAAGCAACTTTTACCAAATTGA |
| | ATTCTGTTTCAGGTGATTCTGAATCAGAAAGTATTAGCCAA |
| | TTTTTCCATATTTTAGGCTCGGTGGAACAACAAAAAGGTCT |
| | TTGTGATGTTGGTGGGGGAAAATACGAGCATACTATTTATT |
| | CCTCGTGTTGCAATATCGATAAAGGAATTTATTATTATAGA |
| | ACATACGGAAACAGTCAAATTACTGGTGTGGATATGCACCA |
| | AGAGGATTTAGAGAGCAAAGAACTAGCTATTTATCCACTCG |
| | TCAATGAGCAACGACTAAACATTGTTAACAAATAA |
| Bile salt hydrolase | MCTSITYTTKDHYFGRNFDYELSYKEVVVVTPKNYPFHFRKV |
| protein from | EDIEKHYALIGIAAVMENYPLYYDATNEKGLSMAGLNFSGNA |
| Listeria | DYKDFAEGKDNVTPFEFIPWILGQCATVKEARRLLQRINLVN |
| monocytogenes | ISFSENLPLSPLHWLMADQTESIVVECVKDGLHIYDNPVGVL |
| SEQ ID NO: 99 | TNNPTFDYQLFNLNNYRVLSSETPENNFSKEIDLDAYSRGMG |
| | GIGLPGDLSSMSRFVKATFTKLNSVSGDSESESISQFFHILG |
| | SVEQQKGLCDVGGGKYEHTIYSSCCNIDKGIYYYRTYGNSQI |
| | TGVDMHQEDLESKELAIYPLVNEQRLNIVNK |
| Bile salt hydrolase | ATGTGTACAGGATTAGCCTTAGAAACAAAAGATGGATTACAT |
| from Clostridium | TTGTTTGGAAGAAATATGGATATTGAATATTCATTTAATCAA |
| perfringens | TCTATTATATTTATTCCTAGGAATTTTAAATGTGTAAACAAA |
| SEQ ID NO: 100 | TCAAACAAAAAAGAATTAACAACAAAATATGCTGTTCTTGGA |
| | ATGGGAACTATTTTTGATGATTATCCTACCTTTGCAGATGGT |
| | ATGAATGAAAAGGGATTAGGGTGTGCTGGCTTAAATTTCCCT |
| | GTTTATGTTAGCTATTCTAAAGAAGATATAGAAGGTAAAACT |
| | AATATTCCAGTATATAATTTCTTATTATGGGTTTTAGCTAAT |
| | TTTAGCTCAGTAGAAGAGGTAAAGGAAGCATTAAAAAATGCT |
| | AATATAGTGGATATACCTATTAGCGAAAATATTCCTAATACA |
| | ACTCTTCATTGGATGATAAGCGATATAACAGGAAAGTCTATT |
| | GTGGTTGAACAAACAAAGGAAAAATTAAATGTATTTGATAAT |
| | AATATTGGAGTATTAACTAATTCACCTACTTTTGATTGGCAT |
| | GTAGCAAATTTAAATCAATATGTAGGTTTGAGATATAATCAA |
| | GTTCCAGAATTTAAGTTAGGAGATCAATCTTTAACTGCTTTA |
| | GGTCAAGGAACTGGTTTAGTAGGATTACCAGGGGACTTTACA |
| | CCTGCATCTAGATTTATAAGAGTAGCATTTTTAAGAGATGCA |
| | ATGATAAAAAATGATAAAGATTCAATAGACTTAATTGAATTT |
| | TTCCATATATTAAATAATGTTGCTATGGTAAGAGGATCAACT |
| | AGAACTGTAGAAGAAAAAAGTGATCTTACTCAATATACAAGT |
| | TGCATGTGTTTAGAAAAAGGAATTTATTATTATAATACCTAT |
| | GAAAATAATCAAATTAATGCAATAGACATGAATAAAGAAAAC |
| | TTAGATGGAAATGAAATTAAAACATATAAATACAACAAAACT |
| | TTAAGTATTAATCATGTAAATTAG |
| Bile salt hydrolase | MCTGLALETKDGLHLFGRNMDIEYSFNQSIIFIPRNFKCVNK |
| protein from | SNKKELTTKYAVLGMGTIFDDYPTFADGMNEKGLGCAGLNFP |
| Clostridium | VYVSYSKEDIEGKTNIPVYNFLLWVLANFSSVEEVKEALKNA |
| perfringens | NIVDIPISENIPNTILHWMISDITGKSIVVEQTKEKLNVFDN |
| SEQ ID NO: 101 | NIGVLTNSPTFDWHVANLNQYVGLRYNQVPEFKLGDQSLTAL |
| | GQGTGLVGLPGDFTPASRYIRVAFLRDAMIKNDKDSIDLIEF |
| | FHILNNVAMVRGSTRTVEEKSDLTQYTSCMCLEKGIYYYNTY |
| | ENNQINAIDMNKENLDGNEIKTYKYNKTLSINHVN |
| Bile salt hydrolase | ATGTGTACGTCTATTACTTATGTAACAAGTGATCATTATTTT |
| from Enterococcus | GGAAGGAATTTTGATTATGAAATATCTTACAATGAAGTAGTT |
| faecium | ACTGTTACTCCAAGAAATTATAAGTTGAATTTTCGAAAGGTA |
| SEQ ID NO: 102 | AATGATTTGGATACTCATTATGCAATGATTGGTATTGCCGCT |
| | GGTATAGCTGACTACCCTCTTTATTACGATGCGACAAATGAA |
| | AAAGGATTGAGTATGGCTGGGCTAAATTTTTCTGGGTATGCT |
| | GATTATAAAGAAATACAAGAAGGGAAAGACAATGTATCTCCT |
| | TTTGAATTTATTCCTTGGATTTTAGGACAATGCTCAACAGTA |
| | GGAGAAGCTAAAAAATTGTTAAAAAATATCAATTTAGCAAAT |
| | ATAAATTATAGTGACGAACTTCCTTTATCCCCTTTACATTGG |
| | CTATTAGCTGATAAAGAAAAATCAATTGTCATTGAAAGTATG |
| | AAAGATGGACTTCATATATATGATAACCCTGTGGGCGTTCTT |
| | ACCAATAATCCTTCATTTGACTATCAATTATTTAATTTAAAC |
| | AATTATCGTGTCTTATCGAGTGAAACTCCTAAAAATAATTTT |
| | TCAAATCAAATAAGTTTGAATGCCTATAGCCGCGGTATGGGA |
| | GGGATAGGCTTGCCTGGAGATTTATCCTCAGTATCTCGTTTT |
| | GTTAAAGCGACTTTTACGAAGCTGAATTCTGTATCTGGAGAT |
| | TCAGAGTCAGAAAGTATTAGTCAATTTTTCCATATCTTAGGT |
| | TCAGTAGAACAACAAAAAGGTTTGTGTGATGTAGGTGATGGA |
| | AAATATGAATATACAATTTATTCTTCTTGTTGCAATGTTGAC |
| | AAAGGAATCTATTATTATCGAACATATGAAGACAGTCAAATT |
| | ACTGCAATTGATATGAATAAAGAAGACTTAGATAGTCATAAG |
| | TTAATTAGTTATCCAATTATAGAAAAACAACAAATTAAATAT |
| | ATAAATTAG |
| Bile salt hydrolase | MCTSITYVTSDHYFGRNFDYEISYNEVVTVTPRNYKLNFRKV |
| protein from | NDLDTHYAMIGIAAGIADYPLYYDATNEKGLSMAGLNFSGYA |
| Enterococcus | DYKEIQEGKDNVSPFEFIPWILGQCSTVGEAKKLLKMINLAN |
| faecium | INYSDELPLSPLHWLLADKEKSIVIE8MKDGLHIYDNPVGVL |
| SEQ ID NO: 103 | TNWPSFDYQLFNLNNYRVLSSETPKNNFSNQISLNAYSRGMG |
| | GIGLPGDLSSVSRFVKATFTKLNSVSGDSESESISQFFHILG |
| | SVEQQKGLCDVGDGKYEYTIYSSCCNVDKGIYYYRTYEDSQI |
| | TAIDMNKEDLDSHKLISYPIIEKQQIKYIN |
| Bile salt hydrolase | AAGAGAAAAATATGTGTACATCAATTATATTCAGTCCCAAAG |
| A from | ATCATTACTTTGGTCGTAACCTTGATTTAGAAATTACTTTTG |
| Lacotbacillus | GTCAACAAGTTGTTATTACGCCACGCAATTACACTTTTAAAT |
| acidophilus | TCCGTAAGATGCCCAGTTTAAAAAAGCACTATGCAATGATTG |
| SEQ ID NO: 104 | GTATCTCATTAGATATGGATGATTATCCCCTATATTTCGACG |
| | CTACAAATGAAAAAGGTTTAGGTATGGCCGGACTCAACTATC |
| | CAGGAAATGCTACATATTATGAAGAAAAAGAAAATAAAGATA |
| | ATATTGCTTCCTTTGAATTCATCCCTTGGATTTTAGGACAGT |
| | GTAGCACTATTAGCGAAGTAAAGGATTTACTTAGCAGAATCA |
| | ACATCGCCGATTTAAATTTCAGCGAAAAAATGCAAGCCTCCT |
| | CTCTTCACTGGCTTATTGCAGATAAAACAGGTACATCATTAG |
| | TTGTTGAAACAGACAAAGATGGAATGCATATTTATGATAATC |
| | CAGTTGGCTGCTTAACTAATAATCCACAATTTCCAAAGCAAT |
| | TATTCAATTTAAATAACTATGCTGACGTATCTCCAAAAATGC |
| | CTAAAAATAACTTCTCAGATAAAGTAAATATGGCTGGCTACA |
| | GCCGTGGATTAGGGTCTCACAACTTACCAGGTGGAATGGATT |
| | CTGAATCACGTTTTGTCAGAGTAGCTTTCAATAAATTTAATG |
| | CTCCAATTGCTGAAACCGAAGAAGAAAATATTGATACTTACT |
| | TCCACATTTTACATTCGGTTGAACAACAAAAGGGACTGGATG |
| | AAGTTGGTCCAAACTCATTTGAATATACAATTTATTCTGATG |
| | GAACTAACTTAGACAAAGGTATTTTCTACTACACCACTTATT |
| | CAAACAAACAAATTAACGTTGTTGATATGAATAAAGAAGATC |
| | TAGATAGCAGCAATTTGATCACTTATGATATGCTTGATAAAA |
| | CTAAATTTAACCATCAAAACTAA |
| Bile salt hydrolase | MCTSIIFSPKDHYFGRNLDLEITFGQQVVITPRNYTFKFRKM |
| A protein from | PSLKKHYAMIGISLDMDDYPLYYDATNEKGLGMAGINYPGNA |
| Lacotbacillus | TYYEEKENKDNIASFEFIPWILGQCSTISEVKDLLSRINIAD |
| acidophilus | LNFSEKMQASSLHWLIADKIGTSLVVETDKDGMHIYDNPVGC |
| SEQ ID NO: 105 | LTNNPQFPKQLFNLNNYADVSPKMPKNNFSDKVNMAGYSRGL |
| | GSHNLPGGMDSESRFVRVAFNKFNAPIAETEEENIDTYFHIL |
| | HSVFOQKGLDEVGPNSFEYTIYSDGINLDKGIFYYTTYSNKQ |
| | INVVDMNKFDLDSSNIITYDPILDKIKFNHQN |
| Bilesalthydrolase | AGAAAGCGTGCAGTAAATGTGTACATCAATTTGTTATAATC |
| B from | CTAACGATCATTATTTTGGTAGAAATCTTGACTATGAAATT |
| Lacotbacillus | GCTTATGGTCAAAAAGTAGTCATTGTACCAAGAAACTACGA |
| acidophilus | ATTTAAGTATAGAGAAATGCCCTCTCAAAAGATGCATTATG |
| SEQ ID NO: 106 | CTTTTATCGGAGTATCTGTAGTTAATGATGATTATCCATTA |
| | TTATGTGATGCAATTAATGAAAAGGGGCTTGGTATTGCAGG |
| | ATTAAATTTTCAAGGTCCTAATCATTACTTTCCTAAAATCG |
| | AAGGTAAGAAGAATATTGCTTCTTTTGAATTAATGCCATAC |
| | TTATTAAGTAATTGTGAAAATACTGACGATGTTAAAGAAAT |
| | CTTAGATAATGCAAATATTTTAAATATTAGCTTTTCAGCAA |
| | ATTATCCTGCAGCTGATTTACATTGGATTTTAAGTGATAAA |
| | GCTGGTAAGAGTATCGTAGTTGAATCAACCAATTCAGGTTT |
| | ACATATTTATGATAATCCAGTGAATGTCTTAACTAACAATC |
| | CTGAATTTCCGGATCAATTAATTAAATTAAGTGACTACGCC |
| | GACGTTACTCCACATAATCCTAAGAATACATTGGTTCCTAA |
| | TGTTGATCTTAATCTATATAGTAGAGGCTTAGGTACTCACC |
| | ACTTACCTGGTGGAATGGATTCTAGCTCTCGATTTGTTAAG |
| | GTAGCTTTTGTCTTGGCACACACTCCACAAGGAAAAAATGA |
| | AGTGGAAAATGTTACTAATTATTTCCATATTCTGCATTCAG |
| | TAGAACAACCTGATGGTTTAGATGAAGTAGAAGATAATCGC |
| | TATGAATATACTATGTATACAGATTGTATGAACTTAGATAA |
| | AGGTATTTTGTACTTTACTACTTATGACAATAATCGGATTA |
| | ATGCAGTAGATATGCATAAAGCAGATTTAGATTCAGAAGAT |
| | TTAATCTGCTACGATTTGTTTAAGAAACAAGATATTGAATA |
| | TATGAATTAA |
| Bile salt hydrolase | MCTSICYNPNDHYFGRNLDYEIAYGQKVVIVPRNYEFKYREM |
| B protein from | PSQKMHYAFIGVSVVNDDYPLLCDAINEKGLGIAGLNFQGPN |
| Lacotbacillus | HYFPKIEGKKNIASFELMPYLLSNCENTDDVKEILDNANILM |
| acidophilus | ISFSANYPAADLHWILSDKAGKSIVVESTNSGLHIYDNPVNV |
| SEQ ID NO: 107 | LTNNPEFPDQLIKLSDYADVTPHNPKNTLVPNVDLNLYSRGL |
| | GTHHLPGGMDSSSRFVKVAFVLAHTPQGKNEVENVTNYFHIL |
| | HSVEQPDGLDEVEDNRYEYTMYTDCMNLDKGILYFTTYDNNR |
| | INAVDMHKADLDSEDLICYDLFKKQDIEYMN |
| Bile salt hydrolase | ATGGAAACGAAAAGCTCTCTCTGGAAATCATCGCGCCGCGT |
| from Brucella | GCTTGCACATGGGGCTGCAACTGTTCTGGTCGCGGCGGGCC |
| abortus | TTATCGTTCCCCAGGCGGCTATGGCTTGCACGAGCTTCGTT |
| SEQ ID NO: 108 | CTGCCGACGAGCGACGGTGGTATGGTCTATGGTCGCACGAT |
| | GGAATTCGGGTTCAATCTCAAATCCGACATGATTGCCATTC |
| | CGCGCAATTACACCATCACGGCAAGCGGGCCGGACGGTGCT |
| | GCGGGCAAGAAATGGAAGGGCAAATATGCCACGATCGGCAT |
| | GAATGCTTTTGGTATCGTCGCTCTCACCGACGGTATGAACG |
| | AGAAGGGGCTTGCAGGCGGGCTTCTCTATTTCCCGGAATAT |
| | GCCAAGTATCAGGACCCATCCACGGCGAAGCCGGAAGACAG |
| | CCTCGCTCCGTGGGATTTCCTGACCTGGGCGCTGGCCAATT |
| | TTTCGACAGTGGCCGAAGTCAAGGATGCTTTGAGCACCATT |
| | TCCATCGTCGATGTGAAACAAAAGGACCTGGGATTTACCCC |
| | GCCCGCTCACTACACGCTGCATGATGCGACCGGCGCATCCA |
| | TCGTGATCGAACCGATCGACGGCAAGCTCAAGGTTTACGAC |
| | AACAAGCTCGGTGTCATGACCAATTCGCCGTCTTTCGACTG |
| | GCACATGACCAATCTGCGCAACTATGTCTATCTCTCGCGTG |
| | AAAATCCGAAGCCGTTGCAGATCCTTGGCGAGACGATCCAG |
| | TCATTCGGGCAAGGCGCCGGTATGCATGGTATTCCGGGCGA |
| | CACCACGCCGCCATCGCGTTTCGTGCGTGCAAGCGCCTACG |
| | TCCTTTCCGCCAAGAAGGTGCCGAGCGGCCTTGAAAGCGTG |
| | CGGCTGGCCGAGCATATTGCCAATAACTTCGACATTCCAAA |
| | GGGATGGAGCGAAGAGCAGAATATGTTTGAATATACCCAGT |
| | GGACCGCCTTTGCGGACATGAAGAACGATGTCTATTACATC |
| | AAGACCTATGACGATCAGGTTCTGCGCAGCTTCAGCTTCAA |
| | GGATTTTGATGTCGATAGCAAAGATATTCTAACGATCAAGT |
| | TCGAGCCAAAACTGGACGCGCCGTCACTGAAAAAGTAA |
| Bile salt hydrolase | METKSSLWKSSRRVLAHGAATVLVAAGLIVPQAAMACTSFVL |
| protein from | PTSDGGMVYGRTMEFGFNLKSDMIAIPRNYTITASGPDGAAG |
| Brucella abortus | KKWKGKYATIGMNAFGIVALTDGMNEKGLAGGLLYFPEYAKY |
| SEQ ID NO: 109 | QDPSTAKPEDSLAPWDFLTWALANFSTVAEVKDALSTISIVD |
| | VKQKDLGFTPPAHYTLHDATGASIVIEPIDGKLKVYDNKLGV |
| | MTNSPSFDWHMTNLRNYVYLSRENPKPLQILGETIQSFGQGA |
| | GMHGIPGDTTPPSRFVRASAYVLSAKKVPSGLESVRLAEHIA |
| | NNFDIPKGWSEEQNMFEYTQWTAFADMKNDVYYIKTYDDQVL |
| | RSFSFKDFDVDSKDILTIKFEPKLDAPSLKK |

[0377] In one embodiment, the bile salt hydrolase gene has at least about 80% identity with the entire sequence of SEQ ID NO: 90. In another embodiment, the bile salt hydrolase gene has at least about 85% identity with the entire sequence of SEQ ID NO: 90. In one embodiment, the bile salt hydrolase gene has at least about 90% identity with the entire sequence of SEQ ID NO: 90. In one embodiment, the bile salt hydrolase gene has at least about 95% identity with the entire sequence of SEQ ID NO: 90. In another embodiment, the bile salt hydrolase gene has at least about 96%, 97%, 98%, or 99% identity with the entire sequence of SEQ ID NO: 90. Accordingly, in one embodiment, the bile salt hydrolase gene has at least about 80%, 81%, 82%, 83%, 84%, 85%, 86%, 87%, 88%, 89%, 90%, 91%, 92%, 93%, 94%, 95%, 96%, 97%, 98%, or 99% identity with the entire sequence of SEQ ID NO: 90. In another embodiment, the bile salt hydrolase gene comprises the sequence of SEQ ID NO: 90. In yet another embodiment the bile salt hydrolase gene consists of the sequence of SEQ ID NO: 90.

[0378] In one embodiment, the bile salt hydrolase gene has at least about 80% identity with the entire sequence of SEQ ID NO: 92. In another embodiment, the bile salt hydrolase gene has at least about 85% identity with the entire sequence of SEQ ID NO: 92. In one embodiment, the bile salt hydrolase gene has at least about 90% identity with the entire sequence of SEQ ID NO: 92. In one embodiment, the bile salt hydrolase gene has at least about 95% identity with the entire sequence of SEQ ID NO: 92. In another embodiment, the bile salt hydrolase gene has at least about 96%, 97%, 98%, or 99% identity with the entire sequence of SEQ ID NO: 92. Accordingly, in one embodiment, the bile salt hydrolase gene has at least about 80%, 81%, 82%, 83%, 84%, 85%, 86%, 87%, 88%, 89%, 90%, 91%, 92%, 93%, 94%, 95%, 96%, 97%, 98%, or 99% identity with the entire sequence of SEQ ID NO: 92. In another embodiment, the bile salt hydrolase gene comprises the sequence of SEQ ID NO: 92. In yet another embodiment the bile salt hydrolase gene consists of the sequence of SEQ ID NO: 92.

[0379] In one embodiment, the bile salt hydrolase gene has at least about 80% identity with the entire sequence of SEQ ID NO: 94 In another embodiment, the bile salt hydrolase gene has at least about 85% identity with the entire sequence of SEQ ID NO: 94. In one embodiment, the bile salt hydrolase gene has at least about 90% identity with the entire sequence of SEQ ID NO: 93. In one embodiment, the bile salt hydrolase gene has at least about 95% identity with the entire sequence of SEQ ID NO: 94. In another embodiment, the bile salt hydrolase gene has at least about 96%, 97%, 98%, or 99% identity with the entire sequence of SEQ ID NO: 94. Accordingly, in one embodiment, the bile salt hydrolase gene has at least about 80%, 81%, 82%, 83%, 84%, 85%, 86%, 87%, 88%, 89%, 90%, 91%, 92%, 93%, 94%, 95%, 96%, 97%, 98%, or 99% identity with the entire sequence of SEQ ID NO: 94. In another embodiment, the bile salt hydrolase gene comprises the sequence of SEQ ID NO: 94. In yet another embodiment the bile salt hydrolase gene consists of the sequence of SEQ ID NO: 94.

[0380] In one embodiment, the bile salt hydrolase gene has at least about 80% identity with the entire sequence of SEQ ID NO: 96 In another embodiment, the bile salt hydrolase gene has at least about 85% identity with the entire sequence of SEQ ID NO: 96. In one embodiment, the bile salt hydrolase gene has at least about 90% identity with the entire sequence of SEQ ID NO: 96. In one embodiment, the bile salt hydrolase gene has at least about 95% identity with the entire sequence of SEQ ID NO: 96. In another embodiment, the bile salt hydrolase gene has at least about 96%, 97%, 98%, or 99% identity with the entire sequence of SEQ ID NO: 96. Accordingly, in one embodiment, the bile salt hydrolase gene has at least about 80%, 81%, 82%, 83%, 84%, 85%, 86%, 87%, 88%, 89%, 90%, 91%, 92%, 93%, 94%, 95%, 96%, 97%, 98%, or 99% identity with the entire sequence of SEQ ID NO: 96. In another embodiment, the bile salt hydrolase gene comprises the sequence of SEQ ID NO: 96. In yet another embodiment the bile salt hydrolase gene consists of the sequence of SEQ ID NO: 96.

[0381] In one embodiment, the bile salt hydrolase gene has at least about 80% identity with the entire sequence of SEQ ID NO: 98. In another embodiment, the bile salt hydrolase gene has at least about 85% identity with the entire sequence of SEQ ID NO: 98. In one embodiment, the bile salt hydrolase gene has at least about 90% identity with the entire sequence of SEQ ID NO: 98. In one embodiment, the bile salt hydrolase gene has at least about 95% identity with the entire sequence of SEQ ID NO: 98. In another embodiment, the bile salt hydrolase gene has at least about 96%, 97%, 98%, or 99% identity with the entire sequence of SEQ ID NO: 98. Accordingly, in one embodiment, the bile salt hydrolase gene has at least about 80%, 81%, 82%, 83%, 84%, 85%, 86%, 87%, 88%, 89%, 90%, 91%, 92%, 93%, 94%, 95%, 96%, 97%, 98%, or 99% identity with the entire sequence of SEQ ID NO: 98. In another embodiment, the bile salt hydrolase gene comprises the sequence of SEQ ID NO: 98. In yet another embodiment the bile salt hydrolase gene consists of the sequence of SEQ ID NO: 98.

[0382] In one embodiment, the bile salt hydrolase gene has at least about 80% identity with the entire sequence of SEQ ID NO: 100. In another embodiment, the bile salt hydrolase gene has at least about 85% identity with the entire sequence of SEQ ID NO: 100. In one embodiment, the bile salt hydrolase gene has at least about 90% identity with the entire sequence of SEQ ID NO: 100. In one embodiment, the bile salt hydrolase gene has at least about 95% identity with the entire sequence of SEQ ID NO: 100. In another embodiment, the bile salt hydrolase gene has at least about 96%, 97%, 98%, or 99% identity with the entire sequence of SEQ ID NO: 100. Accordingly, in one embodiment, the bile salt hydrolase gene has at least about 80%, 81%, 82%, 83%, 84%, 85%, 86%, 87%, 88%, 89%, 90%, 91%, 92%, 93%, 94%, 95%, 96%, 97%, 98%, or 99% identity with the entire sequence of SEQ ID NO: 100. In another embodiment, the bile salt hydrolase gene comprises the sequence of SEQ ID NO: 100. In yet another embodiment the bile salt hydrolase gene consists of the sequence of SEQ ID NO: 100.

[0383] In one embodiment, the bile salt hydrolase gene has at least about 80% identity with the entire sequence of SEQ ID NO: 102. In another embodiment, the bile salt hydrolase gene has at least about 85% identity with the entire sequence of SEQ ID NO: 102. In one embodiment, the bile salt hydrolase gene has at least about 90% identity with the entire sequence of SEQ ID NO: 102. In one embodiment, the bile salt hydrolase gene has at least about 95% identity with the entire sequence of SEQ ID NO: 102. In another embodiment, the bile salt hydrolase gene has at least about 96%, 97%, 98%, or 99% identity with the entire sequence of SEQ ID NO: 102. Accordingly, in one embodiment, the bile salt hydrolase gene has at least about 80%, 81%, 82%, 83%, 84%, 85%, 86%, 87%, 88%, 89%, 90%, 91%, 92%, 93%, 94%, 95%, 96%, 97%, 98%, or 99% identity with the entire sequence of SEQ ID NO: 102. In another embodiment, the bile salt hydrolase gene comprises the sequence of SEQ ID NO: 102. In yet another embodiment the bile salt hydrolase gene consists of the sequence of SEQ ID NO: 102.

[0384] In one embodiment, the bile salt hydrolase gene has at least about 80% identity with the entire sequence of SEQ ID NO: 104. In another embodiment, the bile salt hydrolase gene has at least about 85% identity with the entire sequence of SEQ ID NO: 104. In one embodiment, the bile salt hydrolase gene has at least about 90% identity with the entire sequence of SEQ ID NO: 104. In one embodiment, the bile salt hydrolase gene has at least about 95% identity with the entire sequence of SEQ ID NO: 104. In another embodiment, the bile salt hydrolase gene has at least about 96%, 97%, 98%, or 99% identity with the entire sequence of SEQ ID NO: 104. Accordingly, in one embodiment, the bile salt hydrolase gene has at least about 80%, 81%, 82%, 83%, 84%, 85%, 86%, 87%, 88%, 89%, 90%, 91%, 92%, 93%, 94%, 95%, 96%, 97%, 98%, or 99% identity with the entire sequence of SEQ ID NO: 104. In another embodiment, the bile salt hydrolase gene comprises the sequence of SEQ ID NO: 104. In yet another embodiment the bile salt hydrolase gene consists of the sequence of SEQ ID NO: 104.

[0385] In one embodiment, the bile salt hydrolase gene has at least about 80% identity with the entire sequence of SEQ ID NO: 106. In another embodiment, the bile salt hydrolase gene has at least about 85% identity with the entire sequence of SEQ ID NO: 106. In one embodiment, the bile salt hydrolase gene has at least about 90% identity with the entire sequence of SEQ ID NO: 106. In one embodiment, the bile salt hydrolase gene has at least about 95% identity with the entire sequence of SEQ ID NO: 106. In another embodiment, the bile salt hydrolase gene has at least about 96%, 97%, 98%, or 99% identity with the entire sequence of SEQ ID NO: 106. Accordingly, in one embodiment, the bile salt hydrolase gene has at least about 80%, 81%, 82%, 83%, 84%, 85%, 86%, 87%, 88%, 89%, 90%, 91%, 92%, 93%, 94%, 95%, 96%, 97%, 98%, or 99% identity with the entire sequence of SEQ ID NO: 106. In another embodiment, the bile salt hydrolase gene comprises the sequence of SEQ ID NO: 106. In yet another embodiment the bile salt hydrolase gene consists of the sequence of SEQ ID NO: 106.

[0386] In one embodiment, the bile salt hydrolase gene has at least about 80% identity with the entire sequence of SEQ ID NO: 108. In another embodiment, the bile salt hydrolase gene has at least about 85% identity with the entire sequence of SEQ ID NO: 108. In one embodiment, the bile salt hydrolase gene has at least about 90% identity with the entire sequence of SEQ ID NO: 108. In one embodiment, the bile salt hydrolase gene has at least about 95% identity with the entire sequence of SEQ ID NO: 108. In another embodiment, the bile salt hydrolase gene has at least about 96%, 97%, 98%, or 99% identity with the entire sequence of SEQ ID NO: 108. Accordingly, in one embodiment, the bile salt hydrolase gene has at least about 80%, 81%, 82%, 83%, 84%, 85%, 86%, 87%, 88%, 89%, 90%, 91%, 92%, 93%, 94%, 95%, 96%, 97%, 98%, or 99% identity with the entire sequence of SEQ ID NO: 108. In another embodiment, the bile salt hydrolase gene comprises the sequence of SEQ ID NO: 108. In yet another embodiment the bile salt hydrolase gene consists of the sequence of SEQ ID NO: 108.

[0387] In one embodiment, one or more polypeptides encoded by the and expressed by the genetically engineered bacteria have at least about 80% identity with one or more of SEQ ID NO: 91, 93, 95, 97, 99, 101, 103, 105, 107, and 109. In another embodiment, one or more polypeptides encoded by the propionate circuits and expressed by the genetically engineered bacteria have at least about 85% identity with one or more of SEQ ID NO: 91, 93, 95, 97, 99, 101, 103, 105, 107, and 109. In one embodiment, one or more polypeptides encoded by the propionate circuits and expressed by the genetically engineered bacteria have at least about 90% identity with with one or more of SEQ ID NO: 91, 93, 95, 97, 99, 101, 103, 105, 107, and 109. In one embodiment, one or more polypeptides encoded by the propionate circuits and expressed by the genetically engineered bacteria have at least about 95% identity with with one or more of SEQ ID NO: 91, 93, 95, 97, 99, 101, 103, 105, 107, and 109. In another embodiment, one or more polypeptides encoded by the propionate circuits and expressed by the genetically engineered bacteria have at least about 96%, 97%, 98%, or 99% identity with with one or more of SEQ ID NO: 91, 93, 95, 97, 99, 101, 103, 105, 107, and 109. Accordingly, in one embodiment, one or more polypeptides encoded by the propionate circuits and expressed by the genetically engineered bacteria have at least about 80%, 81%, 82%, 83%, 84%, 85%, 86%, 87%, 88%, 89%, 90%, 91%, 92%, 93%, 94%, 95%, 96%, 97%, 98%, or 99% identity with with one or more of SEQ ID NO: 91, 93, 95, 97, 99, 101, 103, 105, 107, and 109. In another embodiment, one or more polypeptides encoded by the propionate circuits and expressed by the genetically engineered bacteria one or more polypeptides encoded by the propionate circuits and expressed by the genetically engineered bacteria comprise the sequence of with one or more of SEQ ID NO: 91, 93, 95, 97, 99, 101, 103, 105, 107, and 109. In yet another embodiment one or more polypeptides encoded by the propionate circuits and expressed by the genetically engineered bacteria consist of the sequence of with one or more of SEQ ID NO: 91, 93, 95, 97, 99, 101, 103, 105, 107, and 109.

[0388] In one embodiment, the gene encoding the bile salt hydrolase enzyme is directly operably linked to a first promoter. In another embodiment, the gene encoding the bile salt hydrolase enzyme is indirectly operably linked to a first promoter. In one embodiment, the gene encoding bile salt hydrolase enzyme is operably linked to a promoter that it is not nauturally linked to in nature.

[0389] In some embodiments, the gene encoding the bile salt hydrolase enzyme is expressed under the control of a constitutive promoter. In another embodiment, the gene encoding the bile salt hydrolase enzyme is expressed under the control of an inducible promoter. In some embodiments, the gene encoding the bile salt hydrolase enzyme is expressed under the control of a promoter that is directly or indirectly induced by exogenous environmental conditions. In one embodiment, the gene encoding the bile salt hydrolase enzyme is expressed under the control of a promoter that is directly or indirectly induced by low-oxygen or anaerobic conditions, wherein expression of the gene encoding the bile salt hydrolase enzyme is activated under low-oxygen or anaerobic environments, such as the environment of the mammalian gut. Inducible promoters are described in more detail infra.

[0390] In some embodiments, the genetically engineered bacteria are capable of expressing bile sale hydrolase under inducing conditions, e.g., under a condition(s) associated with inflammation. In some embodiments, the genetically engineered bacteria are capable of expressing bile sale hydrolase in low-oxygen conditions, in the presence of certain molecules or metabolites, in the presence of molecules or metabolites associated with liver damage, metabolic disease, inflammation or an inflammatory response, or in the presence of some other metabolite that may or may not be present in the gut, such as arabinose .

[0391] The gene encoding the bile salt hydrolase enzyme may be present on a plasmid or chromosome in the bacterial cell. In one embodiment, the gene encoding the bile salt hydrolase enzyme is located on a plasmid in the bacterial cell. In another embodiment, the gene encoding the bile salt hydrolase is located in the chromosome of the bacterial cell. In yet another embodiment, a native copy of the gene encoding the bile salt hydrolase enzyme is located in the chromosome of the bacterial cell, and a gene encoding a bile salt hydrolase enzyme from a different species of bacteria is located on a plasmid in the bacterial cell. In yet another embodiment, a native copy of the gene encoding the bile salt hydrolase enzyme is located on a plasmid in the bacterial cell, and a gene encoding the bile salt hydrolase enzyme from a different species of bacteria is located on a plasmid in the bacterial cell. In yet another embodiment, a native copy of the gene encoding the bile salt hydrolase enzyme is located in the chromosome of the bacterial cell, and a gene encoding the bile salt hydrolase enzyme from a different species of bacteria is located in the chromosome of the bacterial cell. For example, E. coli comprises a native bile salt hydrolase gene.

[0392] In some embodiments, the gene encoding the bile salt hydrolase enzyme is expressed on a low-copy plasmid. In some embodiments, the gene encoding the bile salt hydrolase enzyme is expressed on a high-copy plasmid. In some embodiments, the high-copy plasmid may be useful for increasing expression of the bile salt hydrolase enzyme, thereby increasing the catabolism of bile salts.

### Transporters of Bile Salts and Bile Acids

[0393] The uptake of bile salts into the Lactobacillus and Bifidobacterium has been found to occur via the bile salt transporters CbsT1 and CbsT2 (see, e.g., Elkins et al., Microbiology, 147(Pt. 12):3403-3412 (2001), the entire contents of which are expressly incorporated herein by reference). The uptake of bile acids into the Neisseria meningitides has been found to occur via the bile acid sodium symporter ASBT (see, e.g., Hu et al., Nature, 478(7369):408-411 (2011), the contents of which are expressly incorporated herein by reference. Other proteins that mediate the import of bile salts or acids into cells are well known to those of skill in the art. For the purposes of this invention, a bile salt transporter includes bile salt importers and bile acid symporters.

[0394] Bile salt transporters, e.g., bile salt importers or bile acid symporters, may be expressed or modified in the bacteria in order to enhance bile salt or acid transport into the cell. Specifically, when the transporter of bile salts is expressed in the recombinant bacterial cells, the bacterial cells import more bile salts into the cell when the transporter is expressed than unmodified bacteria of the same bacterial subtype under the same conditions. Thus, the genetically engineered bacteria comprising a heterologous gene encoding a transporter of bile salts may be used to import bile salts into the bacteria so that any gene encoding a bile salt hydrolase (BSH) enzyme expressed in the organism can be used to treat disorders associated with bile salts, such as cardiac disease, metabolic disease, liver disease, cancer, and C. difficile infection. In one embodiment, the bacterial cell comprises a heterologous gene encoding a transporter of a bile salt. In one embodiment, the bacterial cell comprises a heterologous gene encoding a transporter of a bile salt and a heterologous gene encoding a bile salt hydrolase (BSH) enzyme.

[0395] Thus, in some embodiments, the disclosure provides a bacterial cell that comprises a heterologous gene encoding a bile salt hydrolase enzyme operably linked to a first promoter and a heterologous gene encoding a transporter of a bile salt. In some embodiments, the disclosure provides a bacterial cell that comprises a heterologous gene encoding a transporter of a bile salt operably linked to the first promoter. In another embodiment, the disclosure provides a bacterial cell that comprises a heterologous gene encoding at least one bile salt hydrolase enzyme operably linked to a first promoter and a heterologous gene encoding transporter of a bile salt operably linked to a second promoter. In one embodiment, the first promoter and the second promoter are separate copies of the same promoter. In another embodiment, the first promoter and the second promoter are different promoters. In some embodiments the gene encoding at least one bile salt hydrolase enzyme and/or the heterologous gene encoding transporter of a bile salt are operably linked to a promoter that it is not naturally linked to in nature.

[0396] In one embodiment, the bacterial cell comprises a gene encoding a transporter of a bile salt from a different organism, e.g., a different species of bacteria. In one embodiment, the bacterial cell comprises at least one native gene encoding transporter of a bile salt. In some embodiments, the at least one native gene encoding atransporter of a bile salt is not modified. In another embodiment, the bacterial cell comprises more than one copy of at least one native gene encoding a transporter of a bile salt. In yet another embodiment, the bacterial cell comprises a copy of a gene encoding a native transporter of a bile salt, as well as at least one copy of a heterologous gene encoding a transporter of a bile salt from a different bacterial species. In one embodiment, the bacterial cell comprises at least one, two, three, four, five, or six copies of the heterologous gene encoding a tarnsporter of a bile salt. In one embodiment, the bacterial cell comprises multiple copies of the heterologous gene encoding a transporter of a bile salt.

[0397] In some embodiments, the transporterof a bile salt is encoded by a transporter of a bile salt gene derived from a bacterial genus or species, including but not limited to, Lactobacillus. In some embodiments, the transporterof a bile salt gene is derived from a bacteria of the species Lactobacillus johnsonni strain 100-100.

[0398] The present disclosure further comprises genes encoding functional fragments of a transporter of a bile salt or functional variants of a transporter of a bile salt. As used herein, the term “functional fragment thereof” or “functional variant thereof” of a transporter of a bile salt relates to an element having qualitative biological activity in common with the wild-type transporter of a bile salt from which the fragment or variant was derived. For example, a functional fragment or a functional variant of a mutated transporter of bile salt protein is one which retains essentially the same ability to import the bile salt into the bacterial cell as does the transporter protein from which the functional fragment or functional variant was derived. In one embodiment, the recombinant bacterial cell comprises a heterologous gene encoding a functional fragment of a transporter of a bile salt. In another embodiment, the recombinant bacterial cell comprises a heterologous gene encoding a functional variant of a transporter of a bile salt.

[0399] Assays for testing the activity of a transporter of a bile salt, a functional variant of a transporter of a bile salt, or a functional fragment of a transporter of a bile salt are well known to one of ordinary skill in the art. For example, bile salt import can be assessed as described in Elkins et al., Microbiology, 147:3403-3412 (2001), the entire contents of which are expressly incorporated herein by reference.

[0400] In one embodiment, the gene(s) encoding the transporter of a bile salt have been codon-optimized for use in the host organism. In one embodiment, the genes encoding the transporter of a bile salt have been codon-optimized for use in Escherichia coli.

[0401] The present disclosure also encompasses genes encoding a transporter of a bile salt comprising amino acids in its sequence that are substantially the same as an amino acid sequence described herein. Amino acid sequences that are substantially the same as the sequences described herein include sequences comprising conservative amino acid substitutions, as well as amino acid deletions and/or insertions.

[0402] In some embodiments, the gene encoding a transporter of a bile salt is mutagenized; mutants exhibiting increased bile salt transport are selected; and the mutagenized a gene encoding a transporter of a bile salt is isolated and inserted into the bacterial cell. In some embodiments, the gene encoding a transporter of a bile salt is mutagenized; mutants exhibiting decreased bile salt transport are selected; and the mutagenized a gene encoding a transporter of the bile salt is isolated and inserted into the bacterial cell. The transporter modifications described herein may be present on a plasmid or chromosome. Non-limiting examples of bile salt transporters, which are encoded in the genetically engineered bacteria, are in Table 11B.

TABLE 11B
Bile Salt Transport and Export Sequences

| Description | Sequence |
|---|---|
| cbsT1 from | ATGTCGACCACACCGACACAGCCATCATCACGAAAACAG |
| Lactobacillus | GCTGTTTACCCGTACTTGATCGTGCTGTCGGGCATCGTCT |
| johnsonii | TCACGGCCATCCCGGTATCGCTGGTCTGCAGTTGCGCAGG |
| SEQ ID NO: | TATCTTCTTCACGCCTGTCAGCAGCTACTTCCATGTTCCCA |
| 110 | AGGCCGCATTCACCGGATATTTCAGCATATTCAGCATCAC |
| | CATGGTCGCCTTCCTGCCGGTGGCCGGATGGCTGATGCAC |
| | CGCTACGATCTGCGCATCGTACTGACCGCAAGCACCGTCC |
| | TGGCTGGACTGGGCTGCCTGGGTATGTCCCGATCATCCGC |
| | CATGTGGCAGTTCTATCTATGCGGAGTGGTTCTGGGAATC |
| | GGCATGCCGGCCGTCCTCTATCTGTCAGTGCCAACACTCA |
| | TCAACGCCTGGTTCCGCAAGCGGGTCGGGTTCTTCATCGG |
| | CCTGTGCATGGCCTTCACCGGCATAGGCGGCGTGATCTTC |
| | AACCAGATAGGCACCATGATCATCAGATCCGCCCCTGAT |
| | GGATGGAGGCGGGGATATCTGGTTTTCGCTATTCTCATCC |
| | TGGTGATCACCCTGCCCTTCACCATTTTCGTCATTCGCAG |
| | CACACCCGAACAGATGGGTCTGCATCCCTACGGCGCCGA |
| | CCAGGAGCCTGATGCAGCTGAGACGGCCACCAATAGTGC |
| | AGGCACCGGGAGCAAAGACCAAAAGAGTCCTGAGCCTGC |
| | AGCGTCAACCGTAGGCATGACTGCCTCCCAGGCCTTGCGC |
| | TCCCCTGCCTTCTGGGCGCTGGCGCTCTTCTGCGGTCTGA |
| | TCACCATGAATCAGACCATTTACCAGTTCCTGCCCTCCTA |
| | CGCGGCATCCCTGCCATCCATGGCAGCCTACACGGGACT |
| | GATCGCCTCCTCCTGCATGGCCGGCCAGGCCATCGGCAA |
| | GATCATCCTGGGCATGGTCAACGACGGCAGCATCGTAGG |
| | CGGTCTCTGTCTGGGCATCGGCGGCGGCATTCTCGGCGTC |
| | TGCCTCATGGTCGCCTTCCCCGGATTGCCCGTGCTCCTCCT |
| | GCTGGGAGCCTTTGCCTTCGGCCTTGTCTACGCCTGCACT |
| | ACTGTGCAGACACCAATCCTGGTTACAGCGGTCTTCGGCT |
| | CGCGCGACTACACCAACATCTATGCACGTATCCAGATGGT |
| | TGGGTCCCTAGCCTCGGCCTTCGCAGCTCTCTTCTGGGGC |
| | GCCATCGCTGACCAGCCCCACGGCTACATCATCATGTTCG |
| | GTCTGAGCATCCTGATCATGGTTGTGGCCTTGTTCCTAGG |
| | CATTATCCCTCTGAAAGGTACGCGCAAGTTGACCGATCAG |
| | ATCGCCTGA |
| CbsT1 protein | MSTTPTQPSSRKQAVYPYLIVLSGIVFTAIPVSLVCSCAGIFFT |
| Lactobacillus | PVSSYFHVPKAAFTGYFSIFSITMVAFLPVAGWLMHRYDLRI |
| johnsonii | VLTASTVLAGLGCLGMSRSSAMWQFYLCGVVLGIGMPAVL |
| SEQ ID NO: | YLSVPTLINAWFRKRVGFFIGLCMAFTGIGGVIFNQIGTMIIR |
| 111 | SAPDGWRRGYLVFAILILVTTLPFTIFVIRSTPEQMGLHPYGA |
| | DQEPDAAETATNSAGTGSKDQKSPEPAASTVGMTASQALRS |
| | PAFWALALFCGLITMNQTIYQFLPSYAASLPSMAAYTGLIAS |
| | SCMAGQAIGKIILGMVNDGSIVGGLCLGIGGGILGVCLMVAF |
| | PGLPVLLLLGAFAFGLVYACTTVQTPILVTAVFGSRDYTNIY |
| | ARIQMVGSLASAFAALFWGAIADQPHGYIIMFGLSILIMVVA |
| | LFLGHPLKGTRKLTDQIA |
| cbsT2 from | ATGTCTACTGATGCCGCTACTAAAGATAAAGTAGTAAGC |
| Lactobacillus | AAGGGCTATAAATACTTCATGGTTTTCCTTTGTATGTTAA |
| Johnsonii | CCCAAGCTATTCCTTATGGAATTGCTCAAAACATTCAGCC |
| SEQ ID NO: | TTTGTTTATCCACCCTTTAGTTAATACTTTCCACTTTACCT |
| 112 | TAGCATCGTACACATTAATTTTTACGTTTGGTGCGGTTTTT |
| | GCTTCAGTTGCTTCTCCATTTATTGGTAAGGCATTAGAAA |
| | AAGTTAACTTCCGACTAATGTATTTAATTGGTATTGGTCT |
| | TTCTGCTATTGCCTACGTAATTTTTGGAATTAGTACAAAA |
| | CTACCCGGTTTCTATATTGCCGCTATCATTTGTATGGTTGG |
| | TTCAACCTTTTACTCCGGCCAAGGTGTTCCCTGGGTTATT |
| | AACCACTGGTTCCCAGCAAAGGGACGTGGGGCTGCCTTA |
| | GGAATTGCCTTCTGCGGTGGTTCTATTGGTAATATCTTTTT |
| | ACAACCAGCAACCCAAGCTATTTTAAAACACTACATGAC |
| | AGGTAATACTAAGACCGGTCATTTAACCTCTATGGCACCA |
| | TTCTTTATCTTTGCCGTAGCTTTATTAGTAATCGGTGTAAT |
| | TATCGCCTGCTTCATTAGAACCCCTAAGAAAGACGAAATT |
| | GTTGTTTCTGATGCAGAACTAGCTGAAAGCAAGAAAGCT |
| | GAAGCCGCAGCCAAAGCTAAAGAGTTTAAAGGCTGGACT |
| | AGTAAACAAGTGTTACAAATGAAATGGTTCTGGATTTTCA |
| | GCCTTGGTTTCTTAATCATTGGTTTAGGCTTAGCTTCTTTA |
| | AATGAAGACTATGCCGCCTTCCTTGATACTAAGCTTTCTT |
| | TAACCGATGTTGGTTTAGTTGGGTCAATGTACGGTGTTGG |
| | TTGTTTAATCGGAAATATTTCTGGTGGTTTCTTATTTGATA |
| | AATTTGGTACAGCAAAATCAATGACCTATGCTGGTTGTAT |
| | GTATATTTTATCTATTCTGATGATGATCTTTATTAGCTTCC |
| | AGCCATATGGTTCATCTATTAGTAAGGCTGCTGGCATTGG |
| | CTATGCTATCTTTTGCGGCTTAGCTGTATTTAGTTACATGT |
| | CAGGCCCAGCCTTCATGGCAAAAGACCTCTTTGGTTCAAG |
| | AGATCAAGGTGTCATGCTTGGATACGTTGGTTTAGCTTAT |
| | GCAATTGGCTATGCCATTGGTGCTCCACTATTTGGGATTA |
| | TTAAGGGAGCGGCAAGCTTTACAGTTGCTTGGTACTTTAT |
| | GATTGCCTTTGTTGCAATTGGTTTTATCATTTTAGTATTTG |
| | CCGTTATCCAAATTAAGAGATACCAAAAGAAATACATTG |
| | CAGAGCAAGCAGCAAAAGCTAATGCTAAATAA |
| CbsT2 protein | MSTDAATKDKVVSKGYKYFMVFLCMLTQAIPYGIAQNIQPL |
| from | FIHPLVNTFHFTLASYTLIFTFGAVFASVASPFIGKALEKVNF |
| Lactobacillus | RLMYLIGIGLSAIAYVIFGISTKLPGFYIAAIICMVGSTFYSGQ |
| Johnsonii | GVPWVINHWFPAKGRGAALGIAFCGGSIGNIFLQPATQAILK |
| SEQ ID NO: | HYMTGNTKTGHLTSMAPFFIFAVALLVIGVIIACFIRTPKKDE |
| 113 | IVVSDAELAESKKABAAAKAKEFKGWTSKQVLQMKWFWIF |
| | SLGFLIIGLGLASLNEDYAAFLDTKLSLTDVGLVGSMYGVG |
| | CLIGNISGGFLFDKFGTAKSMTYAGCMYILSILMMIFISFQPY |
| | GSSISKAAGIGYAIFCCLAVFSYMSGPAFMAKDLFGSRDQG |
| | VMLGYVGLAYAIGYAIGAPLFGIIKGAASFTVAWYFMIAFV |
| | AIGFIILVFAVIQIKRYQKKYIABQAAKANAK |
| ABCB11 bile | GAATGATGAAAACCGAGGTTGGAAAAGGTTGTGAAACCT |
| salt exporter | TTTAACTCTCCACAGTGGAGTCCATTATTTCCTCTGGCTTC |
| Homo sapiens | CTCAAATTCATATTCACAGGGTCGTTGGCTGTGGGTTGCA |
| SEQ ID NO: | ATTACCATGTCTGACTCAGTAATTCTTCGAAGTATAAAGA |
| 114 | AATTTGGAGAGGAGAATGATGGTTTTGAGTCAGATAAAT |
| | CATATAATAATGATAAGAAATCAAGGTTACAAGATGAGA |
| | AGAAAGGTGATGGCGTTAGAGTTGGCTTCTTTCAATTGTT |
| | TCGGTTTTCTTCATCAACTGACATTTGGCTGATGTTTGTGG |
| | GAAGTTTGTGTGCATTTCTCCATGGAATAGCCCAGCCAGG |
| | CGTGCTACTCATTTTTGGCACAATGACAGATGTTTTTATT |
| | GACTACGACGTTGAGTTACAAGAACTCCAGATTCCAGGA |
| | AAAGCATGTGTGAATAACACCATTGTATGGACTAACAGT |
| | TCCCTCAACCAGAACATGACAAATGGAACACGTTGTGGG |
| | TTGCTGAACATCGAGAGCGAAATGATCAAATTTGCCAGTT |
| | ACTATGCTGGAATTGCTGTCGCAGTACTTATCACAGGATA |
| | TATTCAAATATGCTTTTGGGTCATTGCCGCAGCTCGTCAG |
| | ATACAGAAAATGAGAAAATTTTACTTTAGGAGAATAATG |
| | AGAATGGAAATAGGGTGGTTTGACTGCAATTCAGTGGGG |
| | GAGCTGAATACAAGATTCTCTGATGATATTAATAAAATCA |
| | ATGATGCCATAGCTGACCAAATGGCCCTTTTCATTCAGCG |
| | CATGACCTCGACCATCTGTGGTTTCCTGTTGGGATTTTTCA |
| | GGGGTTGGAAACTGACCTTGGTTATTATTTCTGTCAGCCC |
| | TCTCATTGGGATTGGAGCAGCCACCATTGGTCTGAGTGTG |
| | TCCAAGTTTACGGACTATGAGCTGAAGGCCTATGCCAAA |
| | GCAGGGGTGGTGGCTGATGAAGTCATTTCATCAATGAGA |
| | ACAGTGGCTGCTTTTGGTGGTGAGAAAAGAGAGGTTGAA |
| | AGGTATGAGAAAAATCTTGTGTTCGCCCAGCGTTGGGGA |
| | ATTAGAAAAGGAATAGTGATGGGATTCTTTACTGGATTCG |
| | TGTGGTGTCTCATCTTTTTGTGTTATGCACTGGCCTTCTGG |
| | TACGGCTCCACACTTGTCCTGGATGAAGGAGAATATACA |
| | CCAGGAACCCTTGTCCAGATTTTCCTCAGTGTCATAGTAG |
| | GAGCTTTAAATCTTGGCAATGCCTCTCCTTGTTTGGAAGC |
| | CTTTGCAACTGGACGTGCAGCAGCCACCAGCATTTTTGAG |
| | ACAATAGACAGGAAACCCATCATTGACTGCATGTCAGAA |
| | GATGGTTACAAGTTGGATCGAATCAAGGGTGAAATTGAA |
| | TTCCATAATGTGACCTTCCATTATCCTTCCAGACCAGAGG |
| | TGAAGATTCTAAATGACCTCAACATGGTCATTAAACCAG |
| | GGGAAATGACAGCTCTGGTAGGACCCAGTGGAGCTGGAA |
| | AAAGTACAGCACTGCAACTCATTCAGCGATTCTATGACCC |
| | CTGTGAAGGAATGGTGACCGTGGATGGCCATGACATTCG |
| | CTCTCTTAACATTCAGTGGCTTAGAGATCAGATTGGGATA |
| | GTGGAGCAAGAGCCAGTTCTGTTCTCTACCACCATTGCAG |
| | AAAATATTCGCTATGGCAGAGAAGATGCAACAATGGAAG |
| | ACATAGTCCAAGCTGCCAAGGAGGCCAATGCCTACAACT |
| | TCATCATGGACCTGCCACAGCAATTTGACACCCTTGTTGG |
| | AGAAGGAGGAGGCCAGATGAGTGGTGGCCAGAAACAAA |
| | GGGTAGCTATCGCCAGAGCCCTCATCCGAAATCCCAAGA |
| | TTCTGCTTTTGGACATGGCCACCTCAGCTCTGGACAATGA |
| | GAGTGAAGCCATGGTGCAAGAAGTGCTGAGTAAGATTCA |
| | GCATGGGCACACAATCATTTCAGTTGCTCATCGCTTGTCT |
| | ACGGTCAGAGCTGCAGATACCATCATTGGTTTTGAACATG |
| | GCACTGCAGTGGAAAGAGGGACCCATGAAGAATTACTGG |
| | AAAGGAAAGGTGTTTACTTCACTCTAGTGACTTTGCAAAG |
| | CCAGGGAAATCAAGCTCTTAATGAAGAGGACATAAAGGA |
| | TGCAACTGAAGATGACATGCTTGCGAGGACCTTTAGCAG |
| | AGGGAGCTACCAGGATAGTTTAAGGGCTTCCATCCGGCA |
| | ACGCTCCAAGTCTCAGCTTTCTTACCTGGTGCACGAACCT |
| | CCATTAGCTGTTGTAGATCATAAGTCTACCTATGAAGAAG |
| | ATAGAAAGGACAAGGACATTCCTGTGCAGGAAGAAGTTG |
| | AACCTGCCCCAGTTAGGAGGATTCTGAAATTCAGTGCTCC |
| | AGAATGGCCCTACATGCTGGTAGGGTCTGTGGGTGCAGC |
| | TGTGAACGGGACAGTCACACCCTTGTATGCCTTTTTATTC |
| | AGCCAGATTCTTGGGACTTTTTCAATTCCTGATAAAGAGG |
| | AACAAAGGTCACAGATCAATGGTGTGTGCCTACTTTTTGT |
| | AGCAATGGGCTGTGTATCTCTTTTCACCCAATTTCTACAG |
| | GGATATGCCTTTGCTAAATCTGGGGAGCTCCTAACAAAA |
| | AGGCTACGTAAATTTGGTTTCAGGGCAATGCTGGGGCAA |
| | GATATTGCCTGGTTTGATGACCTCAGAAATAGCCCTGGAG |
| | CATTGACAACAAGACTTGCTACAGATGCTTCCCAAGTTCA |
| | AGGGGCTGCCGGCTCTCAGATCGGGATGATAGTCAATTC |
| | CTTCACTAACGTCACTGTGGCCATGATCATTGCCTTCTCCT |
| | TTAGCTGGAAGCTGAGCCTGGTCATCTTGTGCTTCTTCCC |
| | CTTCTTGGCTTTATCAGGAGCCACACAGACCAGGATGTTG |
| | ACAGGATTTGCCTCTCGAGATAAGCAGGCCCTGGAGATG |
| | GTGGGACAGATTACAAATGAAGCCCTCAGTAACATCCGC |
| | ACTGTTGCTGGAATTGGAAAGGAGAGGCGGTTCATTGAA |
| | GCACTTGAGACTGAGCTGGAGAAGCCCTTCAAGACAGCC |
| | ATTCAGAAAGCCAATATTTACGGATTCTGCTTTGCCTTTG |
| | CCCAGTGCATCATGTTTATTGCGAATTCTGCTTCCTACAG |
| | ATATGGAGGTTACTTAATCTCCAATGAGGGGCTCCATTTC |
| | AGCTATGTGTTCAGGGTGATCTCTGCAGTTGTACTGAGTG |
| | CAACAGCTCTTGGAAGAGCCTTCTCTTACACCCCAAGTTA |
| | TGCAAAAGCTAAAATATCAGCTGCACGCTTTTTTCAACTG |
| | CTGGACCGACAACCCCCAATCAGTGTATACAATACTGCA |
| | GGTGAAAAATGGGACAACTTCCAGGGGAAGATTGATTTT |
| | GTTGATTGTAAATTTACATATCCTTCTCGACCTGACTCGC |
| | AAGTTCTGAATGGTCTCTCAGTGTCGATTAGTCCAGGGCA |
| | GACACTGGCGTTTGTTGGGAGCAGTGGATGTGGCAAAAG |
| | CACTAGCATTCAGCTGTTGGAACGTTTCTATGATCCTGAT |
| | CAAGGGAAGGTGATGATAGATGGTCATGACAGCAAAAAA |
| | GTAAATGTCCAGTTCCTCCGCTCAAACATTGGAATTGTTT |
| | CCCAGGAACCAGTGTTGTTTGCCTGTAGCATAATGGACAA |
| | TATCAAGTATGGAGACAACACCAAAGAAATTCCCATGGA |
| | AAGAGTCATAGCAGCTGCAAAACAGGCTCAGCTGCATGA |
| | TTTTGTCATGTCACTCCCAGAGAAATATGAAACTAACGTT |
| | GGGTCCCAGGGGTCTCAACTCTCTAGAGGGGAGAAACAA |
| | CGCATTGCTATTGCTCGGGCCATTGTACGAGATCCTAAAA |
| | TCTTGCTACTAGATGAAGCCACTTCTGCCTTAGACACAGA |
| | AAGTGAAAAGACGGTGCAGGTTGCTCTAGACAAAGCCAG |
| | AGAGGGTCGGACCTGCATTGTCATTGCCCATCGCTTGTCC |
| | ACCATCCAGAACGCGGATATCATTGCTGTCATGGCACAG |
| | GGGGTGGTGATTGAAAAGGGGACCCATGAAGAACTGATG |
| | GCCCAAAAAGGAGCCTACTACAAACTAGTCACCACTGGA |
| | TCCCCCATCAGTTGACCCAATGCAAGAATCTCAGACACAC |
| | ATGACGCACCAGTTACAGGGGTTGTTTTTAAAGAAAAAA |
| | ACAATCCCAGCAGGAGGGATTGCTGGGATTGTTTTTTCTT |
| | TAAAGAAGAATGTTAATATTTTACTTTTACAGTCATTTTC |
| | CTACATCGGAATCCAAGCTAATTTCTAATGGCCTTCCATA |
| | ATAATTCTGCTTTAGATGTGTATACAGAAAATGAAAGAA |
| | ACTAGGGTCCATATGAGGGAAAACCCAATGTCAAGTGGC |
| | AGCTCAGCCACCACTCAGTGCTTCTCTGTGCAGGAGCCAG |
| | TCCTGATTAATATGTGGGAATTAGTGAGACATCAGGGAG |
| | TAAGTGACACTTTGAACTCCTCAAGGGCAGAGAACTGTCT |
| | TTCATTTTTGAACCCTCGGTGTACACAGAGGCGGGTCTAT |
| | AACAGGCAATCAACAAACGTTTCTTGAGCTAGACCAAGG |
| | TCAGATTTGAAAAGAACAGAAGGACTGAAGACCAGCTGT |
| | GTTTCTTAACTAAATTTGTCTTTCAAGTGAAACCAGCTTC |
| | CTTCATCTCTAAGGCTAAGGATAGGGAAAGGGTGGATGC |
| | TCTCAGGCTGAGGGAGGCAGAAAGGGAAAGTATTAGCAT |
| | GAGCTTTCCAGTTAGGGCTGTTGATTTATGCTTTAACTTC |
| | AGAGTGAGTGTAGGGGTGGTGATGCT |
| ABCB11 bile | MSDSVILRSIKKFGEENDGFESDKSYNNDKKSRLQDEKKGD |
| salt exporter | GVRVGFFQLFRFSSSTDIWLMFVGSLCAFLHGIAQPGVLLIF |
| protein Homo | GTMTDVFIDYDVELQELQIPGKACVNNTIVWTNSSLNQNMT |
| sapiens | NGTRCGLLNIESEMIKFASYYAGIAVAVLITGYIQICFWVIAA |
| SEQ ID NO: | ARQIQKMRKFYFRRIMRMEIGWFDCNSVGELNTRFSDDINKI |
| 115 | NDAIADQMALFIQRMTSTICGFLLGFFRGWKLTLVIISVSPLI |
| | GIGAATIGLSVSKFTDYELKAYAKAGVVADEVISSMRTVAA |
| | FGGEKREVERYEKNLVFAQRWGIRKGIVMGFFTGFVWCLIF |
| | LCYALAFWYGSTLVLDEGEYTPGTLVQIFLSVIVGALNLGN |
| | ASPCLEAFATGRAAATSIFETIDRKPIIDCMSEDGYKLDRIKG |
| | EIEFHNVTFHYPSRPEVKILNDLNMVIKPGEMTALVGPSGAG |
| | KSTALQLIQRFYDPCEGMVTVDGHDIRSLNIQWLRDQIGIVE |
| | QEPVLFSTTIAENIRYGREDATMEDIVQAAKEANAYNFIMDL |
| | PQQFDTLVGEGGGQMSGGQKQRVAIARALIRNPKILLLDMA |
| | TSALDNESEAMVQEVLSKIQHGHTIISVAHRLSTVRAADTIIG |
| | FEHGTAVERGTHEELLERKGVYFTLVTLQSQGNQALNEEDI |
| | KDATEDDMLARTFSRGSYQDSLRASIRQRSKSQLSYLVHEPP |
| | LAVVDHKSTYEEDRKDKDIPVQEEVEPAPVRRILKFSAPEWP |
| | YMLVGSVGAAVNGTVTPLYAFLFSQILGTFSIPDKEEQRSQI |
| | NGVCLLFVAMGCVSLFTQFLQGYAFAKSGELLTKRLRKFGF |
| | RAMLGQDIAWFDDLRNSPGALTTRLATDASQVQGAAGSQI |
| | GMIVNSFTNVTVAMIIAFSFSWKLSLVILCFFPFLALSGATQT |
| | RMLTGFASRDKQALEMVGQITNEALSNIRTVAGIGKERRFIE |
| | ALETELEKPFKTAIQKANIYGFCFAFAQCIMFIANSASYRYG |
| | GYLISNEGLHFSYVFRVISAVVLSATALGRAFSYTPSYAKAK |
| | ISAARFFQLLDRQPPISVYNTAGEKWDNFQGKIDFVDCKFTY |
| | PSRPDSQVLNGLSVSISPGQTLAFVGSSGCGKSTSIQLLERFY |
| | DPDQGKVMIDGHDSKKVNVQFLRSNIGIVSQEPVLFACSIM |
| | DNIKYGDNTKEIPMERVIAAAKQAQLHDFVMSLPEKYETNV |
| | GSQGSQLSRGEKQRIAIARAIVRDPKILLLDEATSALDTESEK |
| | TVQVALDKAREGRTCIVIAHRLSTIQNADIIAVMAQGVVIEK |
| | GTHEELMAQKGAYYKLVTTGSPIS |
| Streptococcus | MEGRTVFVIAHRLSTIVNSDVILVMDHGRIIKRGDHDTLMEQ |
| thermophilus | GGTYYRLYTGSLEID |
| Msba | |
| subfamily | |
| ABC | |
| transporter | |
| ATP-binding | |
| protein | |
| STH8232_1633 | |
| SEQ ID NO: | |
| 116 | |
| Nostoc spp. | ATGTGGGGGAAACAAAGACAAAGAATCGCCATTGCACGA |
| As11293 ABC | GGGGGTTTTAAGAATTTGCAGGTTTTGATTTTAGATAAAG |
| transporter | CAACCTCGGCATTGGATAATAAAACAGAAGCAGCTATTG |
| gene | AGCGATCGCTGGTGTTGACTGTTGACCAATGA |
| SEQ ID NO: | |
| 117 | |
| Nostoc spp. | MWGKQRQRIAIARGGFKNLQVLILDKATSALDNKTEAMER |
| As11293 ABC | SINLTVDQ. |
| transporter | |
| protein | |
| SEQ ID NO: | |
| 118 | |
| Neisseria | ATGAATATCCTCAGTAAAATCAGCAGCTTTATCGGAAAA |
| meningitides | ACATTTTCCCTCTGGGCCGCGCTCTTTGCCGCCGCCGCTTT |
| (MC58) | TTTCGCGCCCGACACCTTCAAATGGGCGGGGCCTTATATT |
| ASBTNN4 bile | CCTTGGCTGTTGGGCATTATTATGTTCGGTATGGGTTTGA |
| acid sodium | CGCTCAAACCTTCCGACTTCGATATTTTGTTCAAACATCC |
| symporter | CAAAGTCGTCATCATCGGCGTAATCGCACAATTCGCCATT |
| (NMB0705) | ATGCCGGCAACCGCCTGGCTGCTGTCCAAACTGTTGAACC |
| SEQ ID NO: | TGCCTGCCGAAATCGCGGTCGGCGTGATTTTGGTCGGCTG |
| 119 | CTGCCCGGGCGGTACGGCTTCCAATGTGATGACCTATCTG |
| | GCGCGTGGCAATGTGGCTTTGTCGGTTGCCGTTACGTCTG |
| | TTTCCACCCTGATTTCCCCATTGCTGCTCCCGCCATCTTC |
| | TTTCCACCCTGATTTCCCCATTGCTGACTCCCGCCATCTTC |
| | CTGATGCTTGCCGGCGAAATGCTGGAAATCCAAGCGGCC |
| | GGTATGTTGATGTCCATCGTCAAAATGGTTTTGCTCCCCA |
| | TTGTTTTGGGTTTGATTGTCCATAAGGTTTTGGGCAGTAA |
| | AACCGAAAAGCTGACCGATGCGCTGCCGCTGGTTTCCGTT |
| | GCCGCCATCGTGCTGATTATCGGCGCGGTTGTTGGGGCAA |
| | GCAAAGGCAAGATTATGGAAAGCGGCCTTGCTGATTTTTG |
| | CGGTTGTCGTACTCCACAACGGCATCGGCTACCTGCTCGG |
| | CTTCTTTGCCGCCAAATGGACCGGCCTGCCTTATGATGCA |
| | CAAAAAACGCTGACCATCGAAGTCGGTATGCAAAACTCG |
| | GGCCTGGCCGCCGCGCTTGCCGCCGCACACTTTGCCGCCG |
| | CGCCGGTCGTTGCCGTTCCGGGCGCATTGTTCAGCGTGTG |
| | GCACAATATCTCCGGCTCGCTGCTGGCAACTTATTGGGCG |
| | GCCAAAGCCGGTAAACATAAAAAACCCTAA |
| Neisseria | MNILSKISSFIGKTFSLWAALFAAAAFFAPDTFKWAGPYIPW |
| meningitides | LLGIIMFGMGLTLKPSDFDILFKHPKVVIIGVIAQFAIMPATA |
| (MC58) | WLLSKLLNLPAEIAVGVILVGCCPGGTASNVMTYLARGNVA |
| ASBTNm bile | LSVAVTSVSTLISPLLTPAIFLMLAGEMLEIQAAGMLMSIVK |
| acid sodium | MVLLPIVLGLIVHKVLGSKTEKLTDALPLVSVAAIVLIIGAVV |
| symporter | GASKGKIMESGLLIFAVVVLHNGIGYLLGFFAAKWTGLPYD |
| protein | AQKTLTIEVGMQNSGLAAALAAAHFAAAPVVAVPGALFSV |
| SEQ ID NO: | WHNISGSLLATYWAAKAGKHKKPGSENLYFQ |
| 120 | |

[0403] In one embodiment, the bile salt transporter is the bile salt importer CbsT1. In one embodiment, the cbsT1 gene has at least about 80% identity to SEQ ID NO: 110. Accordingly, in one embodiment, the cbsT1 gene has at least about 90% identity to SEQ ID NO: 110. Accordingly, in one embodiment, the cbsT1 gene has at least about 95% identity to SEQ ID NO: 110. Accordingly, in one embodiment, the cbsT1 gene has at least about 85%, 86%, 87%, 88%, 89%, 90%, 91%, 92%, 93%, 94%, 95%, 96%, 97%, 98%, or 99% identity to SEQ ID NO: 110. In another embodiment, the cbsT1 gene comprises the sequence of SEQ ID NO: 110. In yet another embodiment the cbsT1 gene consists of the sequence of SEQ ID NO: 110.

[0404] In one embodiment, the bile salt transporter is the bile salt importer CbsT2. In one embodiment, the cbsT2 gene has at least about 80% identity to SEQ ID NO: 112. Accordingly, in one embodiment, the cbsT2 gene has at least about 90% identity to SEQ ID NO: 112. Accordingly, in one embodiment, the cbsT2 gene has at least about 95% identity to SEQ ID NO: 112. Accordingly, in one embodiment, the cbsT2 gene has at least about 85%, 86%, 87%, 88%, 89%, 90%, 91%, 92%, 93%, 94%, 95%, 96%, 97%, 98%, or 99% identity to SEQ ID NO: 112. In another embodiment, the cbsT2 gene comprises the sequence of SEQ ID NO: 112. In yet another embodiment the cbsT2 gene consists of the sequence of SEQ ID NO: 112.

[0405] In one embodiment, the bile acid transporter is the bile acid sodium symporter ASBT_{NM}. In one embodiment, the NMB0705 gene of Neisseria meningitides has at least about 80% identity to SEQ ID NO: 117. Accordingly, in one embodiment, the NMB0705 gene has at least about 90% identity to SEQ ID NO: 117. Accordingly, in one embodiment, the NMB0705 gene has at least about 95% identity to SEQ ID NO: 117. Accordingly, in one embodiment, the NMB0705 gene has at least about 85%, 86%, 87%, 88%, 89%, 90%, 91%, 92%, 93%, 94%, 95%, 96%, 97%, 98%, or 99% identity to SEQ ID NO: 117. In another embodiment, the NMB0705 gene comprises the sequence of SEQ ID NO: 117. In yet another embodiment the NMB0705 gene consists of the sequence of SEQ ID NO: 117.

[0406] In one embodiment, one or more polypeptides encoded by the and expressed by the genetically engineered bacteria have at least about 80% identity with one or more of SEQ ID NO: 111, 113, 115, 116, 118 and 120. In another embodiment, one or more polypeptides encoded by the propionate circuits and expressed by the genetically engineered bacteria have at least about 85% identity with one or more of SEQ ID NO: 111, 113, 115, 116, 118 and 120. In one embodiment, one or more polypeptides encoded by the propionate circuits and expressed by the genetically engineered bacteria have at least about 90% identity with with one or more of SEQ ID NO: 111, 113, 115, 116, 118 and 120. In one embodiment, one or more polypeptides encoded by the propionate circuits and expressed by the genetically engineered bacteria have at least about 95% identity with with one or more of SEQ ID NO: 111, 113, 115, 116, 118 and 120. In another embodiment, one or more polypeptides encoded by the propionate circuits and expressed by the genetically engineered bacteria have at least about 96%, 97%, 98%, or 99% identity with with one or more of SEQ ID NO: 111, 113, 115, 116, 118 and 120. Accordingly, in one embodiment, one or more polypeptides encoded by the propionate circuits and expressed by the genetically engineered bacteria have at least about 80%, 81%, 82%, 83%, 84%, 85%, 86%, 87%, 88%, 89%, 90%, 91%, 92%, 93%, 94%, 95%, 96%, 97%, 98%, or 99% identity with with one or more of SEQ ID NO: 111, 113, 115, 116, 118 and 120. In another embodiment, one or more polypeptides encoded by the propionate circuits and expressed by the genetically engineered bacteria one or more polypeptides encoded by the propionate circuits and expressed by the genetically engineered bacteria comprise the sequence of with one or more of SEQ ID NO: 111, 113, 115, 116, 118 and 120. In yet another embodiment one or more polypeptides encoded by the propionate circuits and expressed by the genetically engineered bacteria consist of the sequence of with one or more of SEQ ID NO: 111, 113, 115, 116, 118 and 120.

[0407] In some embodiments, the bacterial cell comprises a heterologous gene encoding a bile salt hydrolase enzyme operably linked to a first promoter and a heterologous gene encoding a transporter of a bile salt. In some embodiments, the heterologous gene encoding a transporter of the bile salt is operably linked to the first promoter. In other embodiments, the heterologous gene encoding a transporter of the bile salt is operably linked to a second promoter. In one embodiment, the gene encoding a transporter of the bile salt is directly operably linked to the second promoter. In another embodiment, the gene encoding a transporter of the bile salt is indirectly operably linked to the second promoter.

[0408] In some embodiments, expression of a gene encoding a transporter of a bile salt is controlled by a different promoter than the promoter that controls expression of the gene encoding the bile salt hydrolase enzyme. In some embodiments, expression of the gene encoding a transporter of a bile salt is controlled by the same promoter that controls expression of the bile salt hydrolase enzyme. In some embodiments, a gene encoding a transporter of a bile salt and the bile salt hydrolase enzyme are divergently transcribed from a promoter region. In some embodiments, expression of each of genes encoding the gene encoding a transporter of a bile salt and the gene encoding the bile salt hydrolase enzyme is controlled by different promoters.

[0409] In one embodiment, the gene encoding a transporter of a bile salt is not operably linked with its natural promoter. In some embodiments, the gene encoding the transporter of the bile salt is controlled by its native promoter. In some embodiments, the gene encoding the transporter of the bile salt is controlled by an inducible promoter. In some embodiments, the gene encoding the transporter of the bile salt is controlled by a promoter that is stronger than its native promoter. In some embodiments, the gene encoding the transporter of the bile salt is controlled by a constitutive promoter.

[0410] In another embodiment, the promoter is an inducible promoter. Inducible promoters are described in more detail infra.

[0411] In one embodiment, the gene encoding a transporter of a bile salt is located on a plasmid in the bacterial cell. In another embodiment, the gene encoding a transporter of a bile salt is located in the chromosome of the bacterial cell. In yet another embodiment, a native copy of the gene encoding a transporter of a bile salt is located in the chromosome of the bacterial cell, and a copy of a gene encoding a transporter of a bile salt from a different species of bacteria is located on a plasmid in the bacterial cell. In yet another embodiment, a native copy of the gene encoding a transporter of a bile salt is located on a plasmid in the bacterial cell, and a copy of a gene encoding a transporter of a bile salt from a different species of bacteria is located on a plasmid in the bacterial cell. In yet another embodiment, a native copy of the gene encoding a transporter of a bile salt is located in the chromosome of the bacterial cell, and a copy of the gene encoding a transporter of a bile salt from a different species of bacteria is located in the chromosome of the bacterial cell.

[0412] In some embodiments, the at least one native gene encoding the transporter of a bile salt in the bacterial cell is not modified, and one or more additional copies of the native transporter of a bile salt are inserted into the genome. In one embodiment, the one or more additional copies of the native transporter that is inserted into the genome are under the control of the same inducible promoter that controls expression of the gene encoding the bile salt hydrolase enzyme, e.g., the FNR responsive promoter, or a different inducible promoter than the one that controls expression of the bile salt hydrolase enzyme, or a constitutive promoter. In alternate embodiments, the at least one native gene encoding the transporter is not modified, and one or more additional copies of the transporter from a different bacterial species is inserted into the genome of the bacterial cell. In one embodiment, the one or more additional copies of the transporter inserted into the genome of the bacterial cell are under the control of the same inducible promoter that controls expression of the gene encoding the bile salt hydrolase enzyme, e.g., the FNR responsive promoter, or a different inducible promoter than the one that controls expression of the gene encoding the bile salt hydrolase enzyme, or a constitutive promoter.

[0413] In one embodiment, when the transporter of a bile salt is expressed in the recombinant bacterial cells, the bacterial cells import 10% more bile salt into the bacterial cell when the transporter is expressed than unmodified bacteria of the same bacterial subtype under the same conditions. In another embodiment, when the transporter of a bile salt is expressed in the recombinant bacterial cells, the bacterial cells import 20%, 30%, 40%, 50%, 60%, 70%, 80%, 90% or 100% more bile salt into the bacterial cell when the transporter is expressed than unmodified bacteria of the same bacterial subtype under the same conditions. In yet another embodiment, when the transporter of a bile salt is expressed in the recombinant bacterial cells, the bacterial cells import two-fold more bile salt into the cell when the transporter is expressed than unmodified bacteria of the same bacterial subtype under the same conditions. In yet another embodiment, when the transporter of a bile salt is expressed in the recombinant bacterial cells, the bacterial cells import three-fold, four-fold, five-fold, six-fold, seven-fold, eight-fold, nine-fold, or ten-fold more bile salt into the cell when the transporter is expressed than unmodified bacteria of the same bacterial subtype under the same conditions.

### Exporters of Bile Salts

[0414] The export of bile salts is mediated by proteins well known to those of skill in the art. For example, the ATP-binding cassette, sub-family B member 11 (ABCB11, also called BSEP or “bile salt export pump”) is responsible for the export of taurochoate and other cholate conjugates from hepatocytes to the bile in mammals, and mutations in this gene have been associated with progressive familial intrahepatic cholestasis type 2 (PFIC2) and hepatocellular carcinoma (see Strautnieks et al., Nature Genetics, 20(3):233-238, 1998; Knisely et al., Hepatology, 44(2):478-486, 2006; and Ho et al., Pharmacogenet. Genomics, 20(1):45-57, 2010; SEQ ID NO: 113 and SEQ ID NO:114). In bacteria, Streptococcus thermophilus comprises a bile salt export pump (Msba subfamily ABC transporter ATP-binding protein; accession F8LYG6; SEQ ID NO: 116), and Nostoc spp. are known to comprise a bile salt export pump (As11293; accession Q8YXC2; SEQ ID NO: 117 and SEQ ID NO: 118). Multiple other bile salt exporters are known in the art.

[0415] Thus, in one embodiment of the invention, when the recombinant bacterial cell comprises an endogenous bile salt exporter gene, the recombinant bacterial cells may comprise a genetic modification that reduces export of one or more bile salts from the bacterial cell. In another embodiment, the recombinant bacterial cell comprises a genetic modification that reduces export of one or more bile salts from the bacterial cell and a heterologous gene encoding a bile salt catabolism enzyme. When the recombinant bacterial cells comprise a genetic modification that reduces export of a bile salt, the bacterial cells retain more bile salts in the bacterial cell than unmodified bacteria of the same bacterial subtype under the same conditions. Thus, the recombinant bacteria comprising a genetic modification that reduces export of a bile salt may be used to retain more bile salts in the bacterial cell so that any bile salt catabolism enzyme expressed in the organism can catabolize the bile salt(s) to treat diseases associated with bile salts, including cardiovascular disease. In one embodiment, the recombinant bacteria further comprise a heterologous gene encoding a transporter of one or more bile salts.

[0416] In one embodiment, the recombinant bacterial cell comprises a genetic modification in a gene encoding a bile salt exporter wherein said bile salt exporter comprises an amino acid sequence that has at least 80%, 81%, 82%, 83% 84%, 85%, 86%, 87%, 88%, 89%, 90%, 91%, 92%, 93%, 94%, 95%, 96%, 97%, 98%, 99%, or 100% identity to the amino acid sequence of a polypeptide encoded by a bile salt exporter gene disclosed herein. In one embodiment, the bile salt exporter has at least 80%, 81%, 82%, 83% 84%, 85%, 86%, 87%, 88%, 89%, 90%, 91%, 92%, 93%, 94%, 95%, 96%, 97%, 98%, 99%, or 100% identity to the amino acid sequence of SEQ ID NO: 115. In another embodiment, the bile salt exporter has at least 80%, 81%, 82%, 83% 84%, 85%, 86%, 87%, 88%, 89%, 90%, 91%, 92%, 93%, 94%, 95%, 96%, 97%, 98%, 99%, or 100% identity to the nucleotide sequence of SEQ ID NO: 117.

[0417] In one embodiment, the genetic modification reduces export of a bile salt from the bacterial cell. In one embodiment, the bacterial cell is from a bacterial genus or species that includes but is not limited to, Streptococcus thermophilus or Nostoc spp.

[0418] In one embodiment, the genetic modification is a mutation in an endogenous gene encoding an exporter of one or more bile salts. In one embodiment, the genetic mutation results in an exporter having reduced activity as compared to a wild-type exporter protein. In one embodiment, the activity of the exporter is reduced at least 50%, at least 75%, or at least 100%. In another embodiment, the activity of the exporter is reduced at least two-fold, three-fold, four-fold, or five-fold. In another embodiment, the genetic mutation results in an exporter having no activity, i.e., results in an exporter which cannot export one or more bile salts from the bacterial cell.

[0419] It is routine for one of ordinary skill in the art to make mutations in a gene of interest. Mutations include substitutions, insertions, deletions, and/or truncations of one or more specific amino acid residues or of one or more specific nucleotides or codons in the polypeptide or polynucleotide of the exporter of an amino acid. Mutagenesis and directed evolution methods are well known in the art for creating variants. See, e.g., U.S. Pat. No. 7,783,428; U.S. Pat. No. 6,586,182; U.S. Pat. No. 6,117,679; and Ling, et al., 1999, “Approaches to DNA mutagenesis: an overview,” Anal. Biochem., 254(2):157-78; Smith, 1985, “In vitro mutagenesis,” Ann. Rev. Genet., 19:423-462; Carter, 1986, “Site-directed mutagenesis,” Biochem. J., 237:1-7; and Minshull, et al., 1999, “Protein evolution by molecular breeding,” Current Opinion in Chemical Biology, 3:284-290. For example, the lambda red system can be used to knock-out genes in E. coli (see, for example, Datta et al., Gene, 379:109-115 (2006)).

[0420] The term “inactivated” as applied to a gene refers to any genetic modification that decreases or eliminates the expression of the gene and/or the functional activity of the corresponding gene product (mRNA and/or protein). The term “inactivated” encompasses complete or partial inactivation, suppression, deletion, interruption, blockage, promoter alterations, antisense RNA, dsRNA, or down-regulation of a gene. This can be accomplished, for example, by gene “knockout,” inactivation, mutation (e.g., insertion, deletion, point, or frameshift mutations that disrupt the expression or activity of the gene product), or by use of inhibitory RNAs (e.g., sense, antisense, or RNAi technology). A deletion may encompass all or part of a gene's coding sequence. The term “knockout” refers to the deletion of most (at least about 95%, at least about 96%, at least about 97%, at least about 98%, or at least about 99%) or all (100%) of the coding sequence of a gene. In some embodiments, any number of nucleotides can be deleted, from a single base to an entire piece of a chromosome.

[0421] Assays for testing the activity of an exporter of one or more bile salts are well known to one of ordinary skill in the art. For example, export of one or more bile salts may be determined using the methods described by Telbisz and Homolya, Expert Opinion Ther. Targets, 1-14, 2015, the entire contents of which are expressly incorporated herein by reference.

[0422] In another embodiment, the genetic modification is a mutation in a promoter of an endogenous gene encoding an exporter of one or more bile salts. In one embodiment, the genetic mutation results in decreased expression of the exporter gene. In one embodiment, exporter gene expression is reduced by about 50%, 75%, or 100%. In another embodiment, exporter gene expression is reduced about two-fold, three-fold, four-fold, or five-fold. In another embodiment, the genetic mutation completely inhibits expression of the exporter gene.

[0423] Assays for testing the level of expression of a gene, such as an exporter of one or more bile salts are well known to one of ordinary skill in the art. For example, reverse-transcriptase polymerase chain reaction may be used to detect the level of mRNA expression of a gene. Alternatively, Western blots using antibodies directed against a protein may be used to determine the level of expression of the protein.

[0424] In another embodiment, the genetic modification is an overexpression of a repressor of an exporter of one or more bile salts. In one embodiment, the overexpression of the repressor of the exporter is caused by a mutation which renders the promoter of the repressor constitutively active. In another embodiment, the overexpression of the repressor of the exporter is caused by the insertion of an inducible promoter in front of the repressor so that the expression of the repressor can be induced. Inducible promoters are described in more detail herein.

[0425] In one embodiment, the recombinant bacterial cells described herein comprise at least one genetic modification that reduces export of one or more bile salts from the bacterial cell. In another embodiment, the recombinant bacterial cells described herein comprise two genetic modifications that reduce export of one or more bile salts from the bacterial cell. In another embodiment, the recombinant bacterial cells described herein comprise three genetic modifications that reduce export of one or more bile salts from the bacterial cell. In another embodiment, the recombinant bacterial cells described herein comprise four genetic modifications that reduce export of one or more bile salts from the bacterial cell. In another embodiment, the recombinant bacterial cells described herein comprise five genetic modifications that reduce export of one or more bile salts from the bacterial cell. GLP-2

[0426] In some embodiments, the genetically engineered bacteria of the invention are capable of producing GLP-2 or proglucagon. Glucagon-like peptide 2 (GLP-2) is produced by intestinal endocrine cells and stimulates intestinal growth and enhances gut barrier function (Yazbeck et al., 2009). Obesity is associated with systemic inflammation and intestinal permeability, and commensal bacteria that produce GLP-2 may ameliorate those symptoms of the metabolic disease (Musso et al., 2010). The genetically engineered bacteria may comprise any suitable gene encoding GLP-2 or proglucagon, e.g., human GLP-2 or proglucagon. In some embodiments, a protease inhibitor, e.g., an inhibitor of dipeptidyl peptidase, is also administered to decrease GLP-2 degradation. In some embodiments, the genetically engineered bacteria express a degradation resistant GLP-2 analog, e.g., Teduglutide (Yazbeck et al., 2009). In some embodiments, the gene encoding GLP-2 or proglucagon is modified and/or mutated, e.g., to enhance stability, increase GLP-2 production, and/or increase gut barrier enhancing potency. In some embodiments, the genetically engineered bacteria are capable of expressing GLP-2 or proglucagon in low-oxygen conditions, in the presence of certain molecules or metabolites, in the presence of molecules or metabolites associated with liver damage, inflammation or an inflammatory response, or in the presence of some other metabolite that may or may not be present in the gut, such as arabinose.

[0427] In some embodiments, the genetically engineered bacteria comprise a nucleic acid sequence encoding SEQ ID NO: 121 or a functional fragment thereof. In some embodiments, genetically engineered bacteria comprise a nucleic acid sequence that is at least about 80%, at least about 85%, at least about 90%, at least about 95%, or at least about 99% homologous to a nucleic acid sequence encoding SEQ ID NO: 121 or a functional fragment thereof. In some embodiments, the genetically engineered bacteria are capable of producing GLP-2 under inducing conditions, e.g., under a condition(s) associated with inflammation. In some embodiments, the genetically engineered bacteria are capable of producing GLP-2 in low-oxygen conditions.

TABLE 12A
SEQ ID NO: 121 GLP-2
SEQ ID NO: 121

HADGSFSDEMNTILDNLAARDFINWLIQTKITD

[0428] In some embodiments, the genetically engineered bacteria are capable of producing GLP-2 analogs, including but not limited to, Gattex and teduglutide. Teduglutide is a protease resistan analog of GLP-2. It is made up of 33 amino acids and differs from GLP-2 by one amino acid (alanine is substituted by glycine). The significance of this substitution is that teduglutide is longer acting than endogenous GLP-2 as it is more resistant to proteolysis from dipeptidyl peptidase-4.

TABLE 12B
SEQ ID NO: 122 Teduglutide
SEQ ID NO: 122

HGDGSFSDEMNTILDNLAARDFINWLIQTKITD

[0429] In some embodiments, the genetically engineered bacteria comprise a nucleic acid sequence encoding SEQ ID NO: 122 or a functional fragment thereof. In some embodiments, genetically engineered bacteria comprise a nucleic acid sequence that is at least about 80%, at least about 85%, at least about 90%, at least about 95%, or at least about 99% homologous to a nucleic acid sequence encoding SEQ ID NO: 122 or a functional fragment thereof. In some embodiments, the genetically engineered bacteria are capable of producing Teduglutide under inducing conditions, e.g., under a condition(s) associated with inflammation. In some embodiments, the genetically engineered bacteria are capable of producing Teduglutide in low-oxygen conditions. In any of these embodiments the gene sequence encoding GLP-2 or GLP-2 analog may be operably linked to any of the indicuible promoters described herein. In any of these embodiments, the gene sequence encoding GLP-2 or GLP-2 analog may be operably linked to apromoter that it is not naturallyt linked to in nature.

### Tryptophan and Metabolites

[0430] 1-Tryptophan (TRP) is one of the nine essential amino acids and is the least abundant of all 21 dietary amino acids in human beings. Dietary TRP is transported from the digestive tract through the portal vein to the liver where it is used for the synthesis of proteins. The distinguishing structural characteristic of TRP is that it contains an indole functional group. Apart from protein synthesis, TRP is used in the generation of products such as serotonin, melatonin, tryptamine, indole and other indole metabolites, and kynurenine pathway metabolites (KP, collectively called the kynurenines). TRP and its catabolites have well characterized immunosuppressive and disease tolerance functions, and contribute to immune privileged sites such as eyes, brain, placenta, and testes. The kynurenine pathway represents >95% of TRP- catabolizing pathways and is now established as a key regulator of innate and adaptive immunity through its involvement in cancer, autoimmunity, infection, and gastrointestinal health and gut barrier integrity, and other inflammatory metabolic disorders.

[0431] Several KP Pathway metabolites, most notably kynurenine, have been shown to be activating ligands for the arylcarbon receptor (AhR; also known as dioxin receptor). Kynurenine (KYN) was initially shown in the cancer setting as an endogenous AHR ligand in immune and tumor cells, acting both in an autocrine and paracrine manner, and promoting tumor cell survival.

[0432] In the gut, the kynurenine pathway metabolism is regulated by gut microbiota, which can regulate tryptophan availability for kynurenine pathway metabolism. Tryptophan may be transported across the epithelium by transport machinery comprising angiotensin I converting enzyme 2 (ACE2), and converted to kynurenine, where it functions in the suppression of T cell responses and promotion of Treg cells.

[0433] More recently, additional tryptophan metabolites, collectively termed “indoles”, herein, also have been shown to function as AhR agonists. The metabolites include for example, indole-3 aldehyde, indole-3 acetate, indole-3 propionic acid, indole, indole-3 acetaladehyde, indole-3acetonitrile, FICZ, etc., and tryptamine (are, see e.g., Table 13, FIG. 34, FIG. 35A, FIG. 35B, and FIG. 35A and FIG. 35B and elsewhere herein, and Lama et al., Nat Med. 2016 Jun; 22(6):598-605; CARD9 impacts colitis by altering gut microbiota metabolism of tryptophan into aryl hydrocarbon receptor ligands). The majority of these metabolites are generated by the microbiota; some are generated by the human host and/or taken up from the diet.

[0434] Ahr best known as a receptor for xenobiotics such as polycyclic aromatic hydrocarbons AhR is a ligand-dependent cytosolic transcription factor that is able to translocate to the cell nucleus after ligand binding. The in addition to kynurenine, other tryptophan metabolites, e.g., indoles (described in Table 13, FIG. 34, FIG. 35A, FIG. 35B, and FIG. 32 and elsewhere herein, tryptamine, and kynurenic acide (KYNA) have recently been identified as endogenous AhR ligands mediating immunosuppressive functions. To induce transcription of AhR target genes in the nucleus, AhR partners with proteins such as AhR nuclear translocator (ARNT) or NF-KB subunit RelB. Studies on human cancer cells have shown that KYN activates the AhR-ARNT associated transcription of IL-6, which induced autocrine activation of IDO1 via STAT3. This AhR-IL-6-STAT3 loop is associated with a poor prognosis in lung cancer, supporting the idea that IDO/kynurenine-mediated immunosuppression enables the immune escape of tumor cells.

[0435] More recently, some indole metabolites, including but not limited to indole 3 propionic acid, have been shown to exert their effect through Pregnane X receptor (PXR), which also thought to play a key role as an essential regulator of intestinal barrier function.

### Kynurenine Pathway

### Kynurenine, IDO, and TDO

[0436] The rate-limiting conversion of tryptophan to kynurenine (KYN) may be mediated by either of two forms of indoleamine 2, 3-dioxygenase, IDO1 expressed ubiquitously, IDO2 expressed in kidneys, epididymis, testis, and liver or by tryptophan 2,3-dioxygenase (TDO) expressed in the liver and brain.

[0437] The tryptophan kynurenine pathway is also expressed in a large number of microbiota, most prominently in Enterobacteriaceae, and kynurenine and metabolites may be synthesized in the gut (Sci Transl Med. 2013 Jul. 10; 5(193): 193ra91). In some embodiments, the genetically engineered bacteria comprise one or more heterologous bacterially derived genes from Enterobacteriaceae, e.g. whose gene products catalyze the conversion of TRP:KYN.

[0438] In one embodiment, the genetically engineered bacteria comprise any suitable gene or genes for producing kynurenine. In some embodiments, the genetically engineered bacteria may comprise one or more of the following: a gene or gene cassette for producing a tryptophan transporter, a gene or gene cassette for producing IDO-1, and a gene or gene cassette for producing TDO. In some embodiments, the gene for producing kynurenine is modified and/or mutated, e.g., to enhance stability, increase kynurenine production, and/or increase anti-inflammatory potency under inducing conditions. In some embodiments, the engineered bacteria have enhanced uptake or import of tryptophan, e.g., comprise a transporter or other mechanism for increasing the uptake of tryptophan into the bacterial cell. In some embodiments, the genetically engineered bacteria are capable of producing kynurenine under inducing conditions, e.g., under a condition(s) associated with inflammation. In some embodiments, the genetically engineered bacteria are capable of producing kynurenine in low-oxygen conditions. In some embodiments the genetically engineered bacteria secrete an enzyme which produces kynurenine.

### Post-Kynurenine Metabolism

[0439] As shown in FIG. 32, kynurenine is further metabolized along the two distinct routes competing for kynurenine as a substrate: (a) KYN, kynurenic acid (KYNA) pathway; and (b) KYN, nicotinamide adenine dinucleotide (NAD) pathway.

### Kynurenic Acid, Xanthurenic Acid, Anthranillic Acid

[0440] Kynurenine is further metabolized along the two distinct routes competing for KYN as a substrate: (a) KYN, kynurenic acid (KYNA) pathway; and (b) KYN, nicotinamide adenine dinucleotide (NAD) pathway. Along one arm, KYN may be further metabolized to another bioactive metabolite, kynurenic acid, (KYNA). KYNA is generated by kynurenine aminotransferases (KAT I, II, III) and can also bind AHR and GPCRs, e.g., GPR35, glutamate receptors, N-methyl D-aspartate (NMDA)- receptors.

[0441] The major nerve supply to the gut is also activated the activation of NMDA glutamate receptors in the major nerve supply to the GI tract (i.e., the myenteric plexus) leads to an increase in gut motility (Forrest et al., 2003), but rats treated with kynurenic acid exhibit decreased gut motility and inflammation in the early phase of acute colitis (Varga et al., 2010). Thus, increasing or decreasing kynurenic acid levels may be beneficial to optimally regulate gut motility or gut inflammation.

[0442] KYNA also has signaling functions through activation of its recently identified receptor, GPR35. GPR35 is predominantly detected in immune cells in the gastrointestinal tract, and might be involved in nociceptive perception. KYNA might have an anti-inflammatory effect by inhibition of lipopolysaccharide-induced tumor necrosis factor (TNF)-alpha secretion in peripheral blood mononuclear cells.

[0443] Increased concentrations of KYNA and xanthurenic acid (3-Hydroxy KYNA, XA) were detected in the plasma of patients with type 2 diabetes, presumably due to chronic stress or the low-grade inflammation that are prominent risk factors for diabetes. Thermochemical and kinetic data show that KYNA and XA are the best free- radical scavengers from the eight tested TRP metabolites, suggesting that the production is a regulatory mechanism to attenuate damage by the inflammation-induced production of reactive oxygen species, e.g., in type two diabetes.

[0444] The genetically engineered bacteria may comprise any suitable gene or genes for producing kynurenic acid. In some embodiments, the genetically engineered bacteria are capable of producing kynurenic acid, e.g., from kynurenine through a circuit comprising gene(s) or gene sequence(s) compring kynurenine--oxoglutarate transaminase or an equivalent thereof. In some embodiments, the genetically engineered bacteria comprising gene(s) or gene sequence(s) encoding kynurenine--oxoglutarate transaminase.

[0445] In some embodiments, the gene for producing kynurenic acid is modified and/or mutated, e.g., to enhance stability, increase kynurenic acid production, and/or increase anti-inflammatory potency under inducing conditions. In some embodiments, the genetically engineered bacteria are capable of producing kynurenic acid under inducing conditions, e.g., under a condition(s) associated with inflammation. In some embodiments, the genetically engineered bacteria are capable of producing kynurenic acid in low-oxygen conditions. In some embodiments, the genetically engineered bacteria secrete an enzyme for the production of kynurenic acid.

[0446] In other embodiments, the genetically engineered bacteria are capable of reducing levels of kynurenic acid, e.g., though overexpression of enzymes catabolizing kynurenic acid described herein.

[0447] The KYN-nicotinamide adenine dinucleotide Pathway

[0448] The major enzymes of the KYN-NAD pathway are KYN-3-monooxygenase and kynureninase. Among more than 30 intermediate metabolites (collectively named “kynurenines”) are NMDA agonists (quinolinic and picolinic acids) and free radical generators (3-hydroxykynurenine and 3-hydroxyanthranilic acids). One metabolite, xanthurenic acid, reacts with insulin with formation of a complex indistinguishable from insulin. Quinolinic acid (a glutamate receptor agonist) and picolinic acids stimulate inducible nitric oxide synthase (iNOS and together with 3- hydroxykynurenine and 3-hydroxyanthranilic acids might increase lipid peroxidation, and trigger an arachidonic acid cascade resulting in the increased production of inflammatory factors. As such a means to downregulate such KP metabolites is beneficial, e.g., in the treatment of inflammatory metablic diseases, e.g., T2DM and others described herein.

[0449] Further, Anthranilic and xanthurenic acid can act as antioxidants in certain chemical environments.

[0450] Therefore, finding a means to upregulate and/or downregulate the levels of flux through the KP and to reset relative amounts and/or ratios of tryptophan and its various bioactive metabolites may be useful in the prevention, treatment and/or management of metablic diseases as described herein. The present disclosure describes compositions for modulating, regulating and fine tuning tryptophan and tryptophan metabolite levels, e.g., KP metabolite levels, e.g., in the serum or in the gastrointestinal system, through genetically engineered bacteria which comprise circuitry enabling the synthesis, bacterial uptake and catabolism of tryptophan and/or tryptophan metabolites, e.g., KP metabolites, and provides methods for using these compositions in the treatment, management and/or prevention of a number of different diseases.

[0451] In certain embodiments, the genetically engineered bacteria comprise one or more genes(s) or gene cassettes, which can synthesize tryptophan and/or one or more of its metabolites, e.g., KP metablites, thereby modulating local and/or systemic concentrations and or ratios of tryptophan and/or one or more of its metabolites.

[0452] In some embodiments, the genetically engineered bacteria modulate the inflammatory status, influence immunosuppression, disease tolerance, gut barrier function, satiety.

### Other Indole Tryptophan Metabolites

[0453] In addition to kynurenine and KYNA, numerous compounds have been proposed as endogenous AHR ligands, many of which are generated through pathways involved in the metabolism of tryptophan and indole (Bittinger et al., 2003; Chung and Gadupudi, 2011) A large number of metabolites generated through the tryptophan indole pathway are generated by microbiota in the gut. For example, bacteria take up tryptophan, which can be converted to mono-substituted indole compounds, such as indole acetic acid (IAA) and tryptamine, and other compounds, which have been found to activate the AHR (Hubbard et al., 2015, Adaptation of the human aryl hydrocarbon receptor to sense microbiota-derived indoles; Nature Scientific Reoports 5:12689).

[0454] In the gastronintestinal tract, diet derived and bacterially AhR ligands promote IL-22 production by innate lymphoid cells, referred to as group 3 ILCs (Spits et al., 2013, Zelante et al., Tryptophan Catabolites from Microbiota Engage Aryl Hydrocarbon Receptor and Balance Mucosal Reactivity via Interleukin-22; Immunity 39, 372-385, August 22, 2013). AHR is essential for IL-22-production in the intestinal lamina propria (Lee et al., Nature Immunology 13, 144-151 (2012); AHR drives the development of gut ILC22 cells and postnatal lymphoid tissues via pathways dependent on and independent of Notch).

[0455] Through initiation of Jak-STAT signaling pathways, IL-22 expression can trigger expression of antimicrobial compounds as well as a range of cell growth related pathways, both of which enhance tissue repair mechanisms. IL-22 is critical in promoting intestinal barrier fidelity and healing, while modulating inflammatory states. Murine models have demonstrated improved intestinal inflammation states following administration of IL-22. Additionally, IL-22 activates STAT3 signaling to promote enhanced mucus production to preserve barrier function.

[0456] Additionally, indole metabolites have been suggested to be beneficial in the treatment of metabolic disease, such as type2 diabetes. For example, in addition to its enhancement of the gut barrier function, indole has been found to promote GLP-1 secretion by intestinal enteroendocrine cells, i.e, indole inhibits voltage-gated K+channels, and changes the action potential properties of L cells, ultimately triggering GLP-1 secretion (Chimerel C, et a., (2014) Bacterial metabolite indole modulates incretin secretion from intestinal enteroendocrine L cells. Cell Rep 9:1202-1208).

[0457] Table 13 lists exemplary tryptophan metabolites which have been shown to bind to AhR and which can be produced by the genetically engineered bacteria of the disclosure. Thus, in some embodiments, the engineered bacteria comprises gene sequence(s) encoding one or more enzymes for the production of one or more metabolites listed in Table 13.

TABLE 13
Indole Tryptophan Metabolites

| Origin | Compound |
|---|---|
| Exogenous | 2,3,7,8-Tetrachlorodibenzo-p-dioxin (TCDD) |
| Dietary | Indole-3-carbinol (I3C) |
| Dietary | Indole-3-acetonitrile (I3ACN) |
| Dietary | 3.3′-Diindolylmethane (DIM) |
| Dietary | 2-(indol-3-ylmethyl)-3.3′-diindolylmethane (Ltr-1) |
| Dietary | Indolo(3,2-b)carbazole (ICZ) |
| Dietary | 2-(1′H-indole-3′-carbony)-thiazole-4-carboxylic |
| | acid methyl ester (ITE) |
| Microbial | Indole |
| Microbial | Indole-3-acetic acid (IAA) |
| Microbial | Indole-3-aldehyde (IAId) |
| Microbial | Tryptamine |
| Microbial | 3-methyl-indole (Skatole) |
| Yeast | Tryptanthrin |
| Microbial/Host | Indigo |
| Metabolism | |
| Microbial/Host | Indirubin |
| Metabolism | |
| Microbial/Host | Indoxyl-3-sulfate (I3S) |
| Metabolism | |
| Host | Kynurenine (Kyn) |
| Metabolism | |
| Host | Kynurenic acid (KA) |
| Metabolism | |
| Host | Xanthurenic acid |
| Metabolism | |
| Host | Cinnabarinic acid (CA) |
| Metabolism | |
| UV-Light | 6-formylindolo(3,2-b)carbazole (FICZ) |
| Oxidation | |
| Microbial | |
| metabolism | |

[0458] In addition, some indole metabolites may exert their effect through Pregnane X receptor (PXR), which is thought to play a key role as an essential regulator of intestinal barrier function. PXR-deficient (Nr1i2-/-) mice showed a distinctly “leaky”gut physiology coupled with upregulation of the Toll-like receptor 4 (TLR4), a receptor well known for recognizing LPS and activating the innate immune system (Venkatesh et al., 2014 Symbiotic Bacterial Metabolites Regulate Gastrointestinal Barrier Function via the Xenobiotic Sensor PXR and Toll-like Receptor 4; Immunity 41, 296-310, Aug. 21, 2014). In particular, indole 3-propionic acid (IPA), produced by microbiota in the gut, has been shown to be a ligand for PXR in vivo.

[0459] As a result of PXR agonism, indole metabolite levels e.g., produced by commensal bacteria, or by genetically engineered bacteria, may through the activation of PXR regulate and balance the levels of TLR4 expression to promote homeostasis and gut barrier health. In other words, low levels of IPA and/or PXR and an excess of TLR4 may lead to intestinal barrier dysfunction, while increasing levels of IPA may promote PXR activation and TLR4 downregulation, and improved gut barrier health.

[0460] In other embodiments, IPA producing circuits comprise enzymes depicted and described in FIG. 43 and FIG. 44 and elsewhere herein. Thus, in some embodiments, the engineered bacteria comprise gene sequence(s) encoding one or more enzymes selected from TrpDH: tryptophan dehydrogenase (e.g., from from Nostoc punctiforme NIES-2108); FldH1/F1dH2: indole-3-lactate dehydrogenase (e.g., from Clostridium sporogenes); FldA: indole-3-propionyl-CoA:indole-3-lactate CoA transferase (e.g., from Clostridium sporogenes); FldBC: indole-3-lactate dehydratase, (e.g., from Clostridium sporogenes); FldD: indole-3-acrylyl-CoA reductase (e.g., from Clostridium sporogenes); AcuI: acrylyl-CoA reductase (e.g., from Rhodobacter sphaeroides); 1pdC: Indole-3-pyruvate decarboxylase (e.g., from Enterobacter cloacae); 1ad1: Indole-3-acetaldehyde dehydrogenase (e.g., from Ustilago maydis); and Tdc: Tryptophan decarboxylase (e.g., from Catharanthus roseus or from Clostridium sporogenes). In some embodiments, the engineered bacteria comprise gene sequence(s) and/or gene cassette(s) for the production of one or more of the following: indole-3-propionic acid (IPA), indole acetic acid (IAA), and tryptamine synthesis(TrA).

[0461] Tryptophan dehydrogenase (EC 1.4.1.19) is an enzyme that catalyzes the reversible chemical reaction converting L-tryptophan, NAD(P) and water to (indol-3-yl)pyruvate (IPyA), NH₃, NAD(P)H and H⁺. Indole-3-lactate dehydrogenase ((EC 1.1.1.110, e.g., Clostridium sporogenes or Lactobacillus casei) converts (indol-3y1)pyruvate (IpyA) and NADH and H+ to indole-3-lactate (ILA) and NAD+. Indole-3-propionyl-CoA:indole-3-lactate CoA transferase (F1dA) converts indole-3-lactate (ILA) and indol-3-propionyl-CoA to indole-3-propionic acid (IPA) and indole-3-lactate-CoA. Indole-3-acrylyl-CoA reductase (F1dD) and acrylyl-CoA reductase (Acul) convert indole-3-acrylyl-CoA to indole-3-propionyl-CoA. Indole-3-lactate dehydratase (FldBC) converts indole-3-lactate-CoA to indole-3-acrylyl-CoA. Indole-3-pyruvate decarboxylase (1pdC:) converts Indole-3-pyruvic acid (IPyA) into Indole-3-acetaldehyde (IAA1d) lad1: Indole-3-acetaldehyde dehydrogenase coverts Indole-3-acetaldehyde (IAA1d) into Indole-3-acetic acid (IAA) Tdc: Tryptophan decarboxylase converts tryptophan (Trp) into tryptamine (TrA).

[0462] Although microbial degradation of tryptophan to indole-3-propionate has been shown in a number of microorganisms (see, e.g., Elsden et al., The end products of the metabolism of aromatic amino acids by Clostridia, Arch Microbiol. 1976 Apr 1; 107(3):283-8), to date, the bacterial entire biosynthetic pathway from tryptophan to IPA is unknown. In Clostridium sporogenes, tryptophan is catabolized via indole-3-pyruvate, indole-3-lactate, and indole-3-acrylate to indole-3-propionate (O′Neill and DeMoss, Tryptophan transaminase from Clostridium sporogenes, Arch Biochem Biophys. 1968 Sep 20; 127(1):361-9). Two enzymes that have been purified from C. sporogenes are tryptophan transaminase and indole-3-lactate dehydrogenase (Jean and DeMoss, Indolelactate dehydrogenase from Clostridium sporogenes, Can J Microbiol. 1968 Apr.; 14(4):429-35). Lactococcus lactis, catabolizes tryptophan by an aminotransferase to indole-3-pyruvate. In Lactobacillus casei and Lactobacillus helveticus tryptophan is also catabolized to indole-3-lactate through successive transamination and dehydrogenation (see, e.g., Tryptophan catabolism by Lactobacillus casei and Lactobacillus helveticus cheese flavor adjuncts Gummalla, S., Broadbent, J. R. J. Dairy Sci 82:2070-2077, and references therein).

[0463] L-tryptophan transaminase (e.g., EC 2.6.1.27, e.g., Clostridium sporogenes or Lactobacillus casei) converts L-tryptophan and 2-oxoglutarate to (indo1-3y1)pyruvate and L-glutamate). Indole-3-lactate dehydrogenase (EC 1.1.1.110, e.g., Clostridium sporogenes or Lactobacillus casei) converts (indol-3y1) pyruvate and NADH and H+ to indole-3 lactate and NAD+.

[0464] In some embodiments, the engineered bacteria comprise gene sequence encoding one or more enzymes selected from tryptophan transaminase (e.g., from C. sporogenes) and/or indole-3-lactate dehydrogenase (e.g., from C. sporogenes), and/or indole-3-pyruvate aminotransferase (e.g., from Lactococcus lactis). In other embodiments, such enzymes encoded by the bacteria are from Lactobacillus casei and/or Lactobacillus helveticus.

[0465] In other embodiments, the engineered bacteria comprise IPA-producing circuits comprising enzymes depicted and described in FIG. 43 and FIG. 44 and elsewhere herein. Thus, in some embodiments, the engineered bacteria comprise gene sequence encoding one or more enzymes shown in FIG. 43 and FIG.44.

Methoxyindole pathway, Serotonin and Melatonin

[0466] The methoxyindole pathway leads to formation of serotonin (5-HT) and melatonin. Serotonin (5-hydroxytryptamine, 5-HT) is a biogenic amine synthesized in a two-step enzymatic reaction: First, enzymes encoded by one of two tryptophan hydroxylase genes (Tphl or Tph2) catalyze the rate-limiting conversion of tryptophan to 5-hydroxytryptophan (5-HTP). Subsequently, 5-HTP undergoes decarboxylation to serotonin.

[0467] The majority (95%-98%) of total body serotonin is found in the gut (Berger et al., 2009). Peripheral serotonin acts autonomously on many cells, tissues, and organs, including the cardiovascular, gastrointestinal, hematopoietic, and immune systems as well as bone, liver, and placenta (Amireault et al., 2013). Serotonin functions as a ligand for any of 15 membrane-bound mostly G protein-coupled serotonin receptors (5-HTRs) that are involved in various signal transduction pathways in both CNS and periphery. Intestinal serotonin is released by enterochromaffin cells and neurons and is regulated via the serotonin re-uptake transporter (SERT). The SERT is located on epithelial cells and neurons in the intestine. Gut microbiota are interconnected with serotonin signaling and are for example capable of increasing serotonin levels through host serotonin production (Jano et al., Cell. 2015 Apr 9; 161(2):264-76. doi: 10.1016/j.ce11.2015.02.047. Indigenous bacteria from the gut microbiota regulate host serotonin biosynthesis).

[0468] Modulation of tryptophan metabolism, especially serotonin synthesis is considered a novel potential strategy the treatment of gastrointestinal (GI) disorders and obesity related disorders, such as type 2 diabetes. In mice that lacked the 5-1-iT2C receptor. insulin resistance and development of type 2 diabetes was observed and they later overate and became obese, and 5-HT2C receptor agonists improve blood glucose tolerance.

[0469] In some embodiments, the engineered bacteria comprise gene sequence encoding one or more tryptophan hydroxylase genes (Tph1 or Tph2). In some embodiments, the engineered bacteria further comprise gene sequence for decarboxylating 5-HTP. In some embodiments, the engineered bacteria comprise gene sequence for the production of 5-hydroxytryptophan (5-HTP). In some embodiments, the engineered bacteria comprise gene sequence for the production of seratonin.

[0470] In certain embodiments, the genetically engineered bacteria described herein may modulate serotonin levels in the gut, e.g., decrease or increase serotonin levels, e.g, in the gut and in the circulation. In certain embodiments, the genetically engineered bacteria influence serotonin synthesis, release, and/or degradation. In some embodiments, the genetically engineered bacteria may modulate the serotonin levels in the gut to improve gut barrier function, modulate the inflammatory status, improve glucose tolerance, reduce insulin resistance or otherwise ameliorate symptoms of a metabolic disease and/or an gastrointestinal disorder or inflammatory disorder. In some embodiments, the genetically engineered bacteria take up serotonin from the environment, e.g., the gut. In some embodiments, the genetically engineered bacteria release serotonin into the environment, e.g., the gut. In some embodiments, the genetically engineered modulate or influence serotonin levels produced by the host. In some embodiments, the genetically engineered bacteria counteract microbiota which are responsible for altered serotonin function in many metabolic diseases.

[0471] In some embodiments, the genetically engineered bacteria comprise gene sequence encoding tryptophan hydroxylase (TpH (land/or2)) and/or 1-amino acid decarboxylase, e.g. for the treatment of constipation-associated metablic disorders. In some embodiments, the genetically engineered bacteria comprise genetic cassettes which allow trptophan uptake and catalysis, reducing trptophan availability for serotonin synthesis (serotonin depletion). In some embodiments, the genetically engineered bacteria comprise cassettes which promote serotonin uptake from the environment, e.g., the gut, and serotonin catalysis.

[0472] Additionally, serotonin also functions a substrate for melatonin biosynthesis. Melatonin acts as a neurohormone and is associated with the development of circadian rhythm and the sleep-wake cycle. It has been postulated that melatonin may have a role in glucose metabolism, and several lines of evidence suggest that low melatonin secretion or reduced melatonin signaling can impair insulin sensitivity and lead to type 2 diabetes. For example, Loss-of-function mutations in the melatonin receptor are associated with insulin resistance and type 2 diabetes and McMullan et al observed that lower melatonin secretion was iassociated with a higher risk of developing type 2 diabetes. (see, e.g., McMullan et al., Melatonin secretion and the incidence of type 2 diabetes JAMA. 2013 Apr. 3; 309(13): 1388-1396).

[0473] In bacteria, melatonin is synthesized indirectly with tryptophan as an intermediate product of the shikimic acid pathway. In these cells, synthesis starts with d-erythrose-4-phosphate and phosphoenolpyruvate. In some embodiments, the genetically engineered bacteria comprise an endogenous or exogenous cassette for the production of melatonin. As a non-limiting example, the cassette is described in Bochkov, Denis V.; Sysolyatin, Sergey V.; Kalashnikov, Alexander I.; Surmacheva, Irina A. (2011). “Shikimic acid: review of its analytical, isolation, and purification techniques from plant and microbial sources”. Journal of Chemical Biology 5 (1): 5-17. doi:10.1007/s12154-011-0064-8.

[0474] In a non-limiting example, genetically engineered bacteria convert tryptophan and/or serotonin to melatonin by, e.g., tryptophan hydroxylase (TPH), hydroxyl-O-methyltransferase (HIOMT), N-acetyltransferase (NAT), and aromatic-amino acid decarboxylase (AAAD), or equivalents thereof, e.g., bacterial equivalents.

### Tryptophan and Tryptophan Metabolite Circuits

### Decreasing Exogenous Tryptophan

[0475] In some embodiments, the genetically engineered bacteria are capable of decreasing the level of tryptophan and/or the level of a tryptophan metabolite. In some embodiments, the engineered bacteria comprise gene sequence(s) for encoding one or more aromatic amino acid transporter(s). In one embodiment, the amino acid transporter is a tryptophan transporter. Tryptophan transporters may be expressed or modified in the recombinant bacteria described herein in order to enhance tryptophan transport into the cell. Specifically, when the tryptophan transporter is expressed in the recombinant bacterial cells described herein, the bacterial cells import more tryptophan into the cell when the transporter is expressed than unmodified bacteria of the same bacterial subtype under the same conditions. Thus, the genetically engineered bacteria comprising a heterologous gene encoding a tryptophan transporter which may be used to import tryptophan into the bacteria.

[0476] The uptake of tryptophan into bacterial cells is mediated by proteins well known to those of skill in the art. For example, three different tryptophan transporters, distinguishable on the basis of their affinity for tryptophan have been identified in E. coli (see, e.g., Yanofsky et al. (1991) J. Bacteriol. 173: 6009-17). The bacterial genes mtr, aroP, and tnaB encode tryptophan permeases responsible for tryptophan uptake in bacteria. High affinity permease, Mtr, is negatively regulated by the trp repressor and positively regulated by the TyR product (see, e.g., Yanofsky et al. (1991) J. Bacteriol. 173: 6009-17 and Heatwole, et al. (1991) J. Bacteriol. 173: 3601-04), while AroP is negatively regulated by the tyR product (Chye et al. (1987) J. Bacteriol. 169:386-93).

[0477] In some embodiments, the engineered bacteria comprise gene sequence(s) for encoding one or more aromatic amino acid transporter(s). In one embodiment, the amino acid transporter is a tryptophan transporter. In one embodiment, the at least one gene encoding a tryptophan transporter is a gene selected from the group consisting of mtr, aroP and tnaB. In one embodiment, the bacterial cell described herein has been genetically engineered to comprise at least one heterologous gene selected from the group consisting of mtr, aroP and tnaB. In one embodiment, the at least one gene encoding a tryptophan transporter is the Escherichia coli mtr gene. In one embodiment, the at least one gene encoding a tryptophan transporter is the Escherichia coli aroP gene. In one embodiment, the at least one gene encoding a tryptophan transporter is the Escherichia coli tnaB gene.

[0478] In some embodiments, the tryptophan transporter is encoded by a tryptophan transporter gene derived from a bacterial genus or species, including but not limited to, Escherichia, Corynebacterium, Escherichia coli, Saccharomyces cerevisiae or Corynebacterium glutamicum. In some embodiments, the bacterial species is Escherichia coli. In some embodiments, the bacterial species is Escherichia coli strain Nissle.

[0479] Assays for testing the activity of a tryptophan transporter, a functional variant of a tryptophan transporter, or a functional fragment of transporter of tryptophan are well known to one of ordinary skill in the art. For example, import of tryptophan may be determined using the methods as described in Shang et al. (2013) J. Bacteriol. 195:5334-42, the entire contents of each of which are expressly incorporated by reference herein.

[0480] In one embodiment, when the tryptophan transporter is expressed in the recombinant bacterial cells described herein, the bacterial cells import 10% more tryptophan into the bacterial cell when the transporter is expressed than unmodified bacteria of the same bacterial subtype under the same conditions. In another embodiment, when the tryptophan transporter is expressed in the recombinant bacterial cells described herein, the bacterial cells import 20%, 30%, 40%, 50%, 60%, 70%, 80%, 90% or 100% more tryptophan into the bacterial cell when the transporter is expressed than unmodified bacteria of the same bacterial subtype under the same conditions. In yet another embodiment, when the tryptophan transporter is expressed in the recombinant bacterial cells described herein, the bacterial cells import two-fold more tryptophan into the cell when the transporter is expressed than unmodified bacteria of the same bacterial subtype under the same conditions. In yet another embodiment, when the tryptophan transporter is expressed in the recombinant bacterial cells described herein, the bacterial cells import three-fold, four-fold, five-fold, six-fold, seven-fold, eight-fold, nine-fold, ten-fold, fifteen-fold, twenty-fold, thirty-fold, fourty-fold, or fifty-fold, more tryptophan into the cell when the transporter is expressed than unmodified bacteria of the same bacterial subtype under the same conditions.

[0481] In addition to the tryptophan uptake transporters, in some embodiments, the genetically engineered bacteria further comprise a circuit for the production of tryptophan metabolites, as described herein, e.g., for the production of kynurenine, kynurenine metabolites, or indole tryptophan metabolites as shown in Table 13.

[0482] In some embodiments, the genetically engineered bacteria are capable of decreasing the level of tryptophan. In some embodiments, the engineered bacteria comprises one or more gene sequences for converting tryptophan to kynurenine. In some embodiments, the engineered bacteria comprises gene sequence(s) for encoding the enzyme indoleamine 2,3-dioxygenase (IDO-1). In some embodiments, the engineered bacteria comprises gene sequence(s) for encoding the enzyme tryptophan dioxygenase (TDO). In some embodiments, the engineered bacteria comprises gene sequence(s) for encoding the enzyme indoleamine 2,3-dioxygenase (IDO-1) and the enzyme tryptophan dioxygenase (TDO). In some embodiments, the genetically engineered bacteria comprise a gene cassette encoding Indoleamine 2, 3 dioxygenase (EC 1.13.11.52; producing N-formyl kynurenine from tryptophan) and Kynurenine formamidase (EC3.5.1.9) producing kynurenine from n-formylkynurenine). In some embodiments, the enzymes are bacterially derived, e.g., as described in Vujkovi-Cvijin et al. 2013.

[0483] In some embodiments, the genetically engineered bacteria are capable of decreasing the level of tryptophan, e.g., in combination with the production of indole metabolites, through expression of gene(s) and gene cassette(s) described herein. In some embodiments, the gene sequences(s) are driven by an inducible promoter. In some embodiments, the gene sequences(s) are driven by a constitutive promoter.

### Increasing Kynurenine

[0484] In some embodiments, the genetically engineered bacteria are capable of producing kynurenine.

[0485] In some embodiments, the genetically engineered bacteria are capable of decreasing the level of tryptophan. In some embodiments, the engineered bacteria comprise one or more gene sequences for converting tryptophan to kynurenine. In some embodiments, the engineered bacteria comprise gene sequence(s) for encoding the enzyme indoleamine 2,3-dioxygenase (IDO-1). In some embodiments, the engineered bacteria comprise gene sequence(s) for encoding the enzyme tryptophan dioxygenase (TDO). In some embodiments, the engineered bacteria comprise on or more gene sequence(s) for encoding the enzyme indoleamine 2,3-dioxygenase (IDO-1) and the enzyme tryptophan dioxygenase (TDO). In some embodiments, the genetically engineered bacteria comprise a gene cassette encoding Indoleamine 2, 3 dioxygenase (EC 1.13.11.52; producing N-formyl kynurenine from tryptophan) and Kynurenine formamidase (EC3.5.1.9) producing kynurenine from n-formylkynurenine). In some embodiments, the enzymes are bacterially derived, e.g., as described in Vujkovi-Cvijin et al. 2013.

[0486] In one embodiment, the genetically engineered bacteria comprise one or more gene sequence(s) which encode one or more tryptophan catabolism enzymes, which produce kynurenine from tryptophan. Non-limiting example of such gene sequence(s) are shown FIG. 37E and described elsewhere herein. In one embodiment, the genetically engineered bacteria comprise one or more gene sequence(s) which encode IDO1(indoleamine 2,3-dioxygenase). In one embodiment, the genetically engineered bacteria comprise one or more gene sequence(s) which encode IDO1 from homo sapiens. In one embodiment, the genetically engineered bacteria comprise one or more gene sequence(s) which encode TDO2 (tryptophan 2,3-dioxygenase). In one embodiment, the genetically engineered bacteria comprise one or more gene sequence(s) which encode TDO2 from homo sapiens. In one embodiment, the genetically engineered bacteria comprise one or more gene sequence(s) which encode BNA2 (indoleamine 2,3-dioxygenase). In one embodiment, the genetically engineered bacteria comprise one or more gene sequence(s) which encode BNA2 from S. cerevisiae). In one embodiment, the genetically engineered bacteria comprise one or more gene sequence(s) which encode Afmid: Kynurenine formamidase. In one embodiment, the genetically engineered bacteria comprise one or more gene sequence(s) which encode Afmid: Kynurenine formamidase from mouse. In one embodiment, the genetically engineered bacteria comprise one or more gene sequence(s) which encode Afmid in combination with one or more of idol and/or tdo2 and/or bna2. In one embodiment, the genetically engineered bacteria comprise one or more gene sequence(s) which encode Afmid in combination with idol. In one embodiment, the genetically engineered bacteria comprise one or more gene sequence(s) which encode BNA2 in combination with tdo2. In one embodiment, the genetically engineered bacteria comprise one or more gene sequence(s) which encode Afmid in combination with bna2.In one embodiment, the genetically engineered bacteria comprise one or more gene sequence(s) which encode BNA3 (kynurenine-oxoglutarate transaminase. In one embodiment, the genetically engineered bacteria comprise one or more gene sequence(s) which encode BNA3 from S. cerevisae. In one embodiment, the genetically engineered bacteria comprise one or more gene sequence(s) which encode BNA2 in combination with one or more of idol and/or tdo2 and/or bna2. In one embodiment, the genetically engineered bacteria comprise one or more gene sequence(s) which encode BNA2 in combination with idol. In one embodiment, the genetically engineered bacteria comprise one or more gene sequence(s) which encode BNA2 in combination with tdo2. In one embodiment, the genetically engineered bacteria comprise one or more gene sequence(s) which encode BNA2 in combination with bna2.In one embodiment, the genetically engineered bacteria comprise one or more gene sequence(s) which encode one or more of ido 1 and/or tdo2 and/or bna2.In one embodiment, the genetically engineered bacteria comprise one or more gene sequence(s) which encode one or more of afmid and/or bna3.

[0487] In one embodiment, the genetically engineered bacteria comprise one or more gene sequence(s) which encode one or more of ido 1 and/or tdo2 and/or bna2, in combination with one or more of afmid and/or bna3.

[0488] In any of these embodiments, the genetically engineered bacteria which produce kynurenine from tryptophan also optionally comprise one or more gene sequence(s) comprising one or more enzymes for tryptophan production, and gene deletions/or mutations as depicted and described in FIG. 36, FIG. 40A and/or FIG. 40B and described elsewhere herein. In some embodiments, the genetically engineered bacteria which produce kynurenine from tryptophan also optionally comprise one or more gene sequence(s) which encode one or more transporter(s) as described herein, through which tryptophan can be imported. Optionally, in some embodiments, the genetically engineered bacteria which produce kynurenine from tryptophan also optionally comprise one or more gene sequence(s) which encode an exporter as described herein, which can export tryptophan or any of its metabolites.

[0489] The genetically engineered bacteria may comprise any suitable gene for producing kynurenine. In some embodiments, the gene for producing kynurenine is modified and/or mutated, e.g., to enhance stability, increase kynurenine production, and/or increase anti-inflammatory potency under inducing conditions. In some embodiments, the engineered bacteria also have enhanced uptake or import of tryptophan, e.g., comprise a transporter or other mechanism for increasing the uptake of tryptophan into the bacterial cell, as discussed in detail above. In some embodiments, the genetically engineered bacteria are capable of producing kynurenine under inducing conditions, e.g., under a condition(s) associated with inflammation, and/or a metabolic disorder. In some embodiments, the genetically engineered bacteria are capable of producing kynurenine in low-oxygen conditions, in the presence of certain molecules or metabolites, in the presence of molecules or metabolites associated with metabolic disorders, such as liver damage, metabolic disease, inflammation or an inflammatory response, or in the presence of some other metabolite that may or may not be present in the gut, such as arabinose and others described herein. In some embodiments, the gene sequences(s) are controlled by an inducible promoter. In some embodiments, the gene sequences(s) are controlled by a constitutive promoter. In some embodiments, the gene sequences(s) are controlled by an inducible and/or constritutive promoter, and are expressed during bacterial culture in vitro, e.g., for bacterial expansion, production and/or manufacture, as described herein.

[0490] In some embodiments, the genetically engineered bacteria comprise one or more gene(s) or gene cassette(s) for the consumption of tryptophan and production of kynurenine, which are bacterially derived. In some embodiments, the enzymes for TRP to KYN conversion are derived from one or more of Pseudomonas, Xanthomonas, Burkholderia, Stenotrophomonas, Shewanella, and Bacillus, and/or members of the families Rhodobacteraceae, Micrococcaceae, and Halomonadaceae, In some embodiments the enzymes are derived from the species listed in table S7 of Vujkovic-Cvijin et al. (Dysbiosis of the gut microbiota is associated with HIV diseaseprogression and tryptophan catabolism Sci Transl Med. 2013 Jul. 10; 5(193): 193ra91), the contents of which is herein incorporated by reference in its entirety.

[0491] In some embodiments, the one or more genes for producing kynurenine are modified and/or mutated, e.g., to enhance stability, increase kynurenine production, and/or increase anti-inflammatory potency under inducing conditions. In some embodiments, the engineered bacteria have enhanced uptake or import of tryptophan, e.g., comprise a transporter or other mechanism for increasing the uptake of tryptophan into the bacterial cell. In some embodiments, the genetically engineered bacteria are capable of producing kynurenine under inducing conditions, e.g., under a condition(s) associated with inflammation. In some embodiments, the genetically engineered bacteria are capable of producing kynurenine in low-oxygen conditions, in the presence of certain molecules or metabolites, in the presence of molecules or metabolites associated with liver damage, metabolic disease, inflammation or an inflammatory response, or in the presence of some other metabolite that may or may not be present in the gut, such as arabinose and others described herein.

[0492] In any of the embodiments described above and elsewhere herein, the genetically engineered bacteria are capable of expressing any one or more of the described circuits in low-oxygen conditions, in the presence of disease or tissue specific molecules or metabolites, in the presence of molecules or metabolites associated with inflammation or an inflammatory response or immune suppression, liver damage, or metabolic disease, or in the presence of some other metabolite that may or may not be present in the gut, such as arabinose and others described herein. In some embodiments, any one or more of the described circuits are present on one or more plasmids (e.g., high copy or low copy) or are integrated into one or more sites in the bacterial chromosome. Also, in some embodiments, the genetically engineered bacteria are further capable of expressing any one or more of the described circuits and further comprise one or more of the following: (1) one or more auxotrophies, such as any auxotrophies known in the art and provided herein, e.g., thyA auxotrophy, (2) one or more kill switch circuits, such as any of the kill-switches described herein or otherwise known in the art, (3) one or more antibiotic resistance circuits, (4) one or more transporters for importing biological molecules or substrates, such any of the transporters described herein or otherwise known in the art, (5) one or more secretion circuits, such as any of the secretion circuits described herein and otherwise known in the art, and (6) combinations of one or more of such additional circuits.

### Increasing Tryptophan

[0493] In some embodiments, the genetically engineered microorganisms of the present disclosure are capable of producing tryptophan. Exemplary circuits for the production of tryptophan are shown in FIG. 36(A-D), FIG. 37A.

[0494] In some embodiments, the genetically engineered bacteria that produce tryptophan comprise one or more gene sequences encoding one or more enzymes of the tryptophan biosynthetic pathway. In some embodiments, the genetically engineered bacteria comprise a tryptophan operon. In some embodiments, the genetically engineered bacteria comprise the tryptophan operon of E. coli . (Yanofsky, RNA (2007), 13:1141-1154). In some embodiments, the genetically engineered bacteria comprise the tryptophan operon of B. subtilis. (Yanofsky, RNA (2007), 13:1141-1154). In some embodiments, the genetically engineered bacteria comprise sequence(s) encoding trypE, trypG-D, trypC-F, trypB, and trpA genes. In some embodiments, the genetically engineered bacteria comprise sequence(s) encoding trypE, trypG-D, trypC-F, trypB, and trpA genes from E. Coli. In some embodiments, the genetically engineered bacteria comprise sequence(s) encoding trypE, trypD, trypC, trypF, trypB, and trpA genes from B. subtilis.

[0495] Also, in any of these embodiments, the genetically engineered bacteria optionally comprise gene sequence(s) to produce the tryptophan precursor, chorismate. Thus, in some embodiments, the genetically engineered bacteria optionally comprise sequence(s) encoding aroG, aroF, aroH, aroB, aroD, aroE, aroK, and AroC. In some embodiments, the genetically engineered bacteria comprise one or more gene sequences encoding one or more enzymes of the tryptophan biosynthetic pathway and one or more gene sequences encoding one or more enzymes of the chorismate biosynthetic pathway. In some embodiments, the genetically engineered bacteria comprise sequence(s) encoding trypE, trypG-D, trypC-F, trypB, and trpA genes from E. Coli and sequence(s) encoding aroG, aroF, aroH, aroB, aroD, aroE, aroK, and AroC genes. In some embodiments, the genetically engineered bacteria comprise sequence(s) encoding trypE, trypD, trypC, trypF, trypB, and trpA genes from B. subtilis and sequence(s) encoding aroG, aroF, aroH, aroB, aroD, aroE, aroK, and AroC genes.

[0496] In some embodiments, the genetically engineered bacteria comprise sequence(s) encoding either a wild type or a feedback resistant SerA gene (Table 10). Escherichia coli serA-encoded 3-phosphoglycerate (3PG) dehydrogenase catalyzes the first step of the major phosphorylated pathway of L-serine (Ser) biosynthesis. This step is an oxidation of 3PG to 3-phosphohydroxypyruvate (3PHP) with the concomitant reduction of NAD+to NADH. As part of Tryptophan biosynthesis, E. coli uses one serine for each tryptophan produced. As a result, by expressing serA, tryptophan production is improved (see, e.g., FIG. 40A and FIG. 40B, FIG. 36C, FIG. 36D.

[0497] In any of these embodiments, AroG and TrpE are optionally replaced with feedback resistant versions to improve tryptophan production (Table 15).

[0498] In any of these embodiments, the tryptophan repressor (trpR) optionally may be deleted, mutated, or modified so as to diminish or obliterate its repressor function.

[0499] In any of these embodiments the tnaA gene (encoding a tryptophanase converting Trp into indole) optionally may be deleted to prevent tryptophan catabolism along this pathway and to further increase levels of tryptophan produced (Table 15.

[0500] The inner membrane protein YddG of Escherichia coli, encoded by the yddG gene, is a homologue of the known amino acid exporters RhtA and YdeD. Studies have shown that YddG is capable of exporting aromatic amino acids, including tryptophan. Thus, YddG can function as a tryptophan exporter or a tryptophan secretion system (or tryptophan secretion protein). Other aromatic amino acid exporters are described in Doroshenko et al., FEMS Microbial Lett., 275:312-318 (2007). Thus, in some embodiments, the engineered bacteria optionally further comprise gene sequence(s) encoding YddG. In some embodiments, the engineered bacteria can over-express YddG. In some embodiments, the engineered bacteria optionally comprise one or more copies of yddG gene.

[0501] In some embodiments, the genetically engineered bacterium or genetically engineered microorganism comprises one or more genes for producing tryptophan, under the control of a promoter that is activated by low-oxygen conditions, by inflammatory conditions, liver damage, and.or metabolic disease, such as any of the promoters activated by said conditions and described herein. In some embodiments, the genetically engineered bacteria expresses one or more genes for producing tryptophan. In some embodiments, the gene sequences(s) are controlled by an inducible promoter. In some embodiments, the gene sequences(s) are controlled by a constitutive promoter. In some embodiments, the gene sequences(s) are controlled by an inducible and/or constritutive promoter, and are expressed during bacterial culture in vitro, e.g., for bacterial expansion, production and/or manufacture, as described herein.

[0502] Table 14 lists exemplary tryptophan synthesis cassettes encoded by the genetically engineered bacteria of the disclosure.

TABLE 14
Tryptophan Synthesis Cassette Sequences

| Description | Sequence |
|---|---|
| Tet-regulated | taagacccactttcacatttaagttgatttctaatccgcatatgatcaattcaaggccgaataagaaggctggact |
| Tryptophan | gcaccttggtgatcaaataattcgatagatgtcgtaataatggcggcatactatcagtagtaggtgtttccctttct |
| operon | tattagcgacttgatgacttgatatccaatacgcaacctaaagtaaaatgccccacagcgctgagtgcatata |
| SEQ ID NO: | atgcattactagtgaaaaaccttgaggcataaaaaggctaattgattttcgagagtttcatactgatttctgtagg |
| 123 | ccgtgtacctaaatgtacttttgaccatcgcgatgacttagtaaagcacatctaaaacttttagcgttattacgtaa |
| | aaaatatgccagattcccatctaaagggcaaaagtgagtatggtgcctatctaacatctcaatggctaaggcg |
| | tcgagcaaagcccgcttattattacatgccaatacaatgtaggctgactacacctagatctgggcgagtttacg |
| | ggttgttaaaccttcgattccgacctcattaagcagactaatgcgctgttaatcactttacttttatctaatctagaca |
| | tcattaattcctaatttttgttgacactctatcattgatagagttattttaccactccctatcagtgatagagaaaagtg |
| | aactctagaaataattttgtttaactttaagaaggagatatacatatgcaaacacaaaaaccgactctcgaactgct |
| | aacctgcgaaggcgcttatcgcgacaacccgactgcgctttttcaccagttgtgtggggatcgtccggcaacg |
| | ctgctgctggaatccgcagatatcgacagcaaagatgatttaaaaagcctgctgctggtagacagtgcgctgc |
| | gcattacagcattaagtgacactgtcacaatccaggcgctttccggcaatggagaagccctgttgacactactg |
| | gataacgccagcctgcgggtgtggaaaatgaacaatcaccaaactgccgcgtactgcgcacccgcctgtca |
| | gtccactgctggatgaagacgcccgcttatgctcccatcggtattgacgctaccgcttattacagaatctgaga |
| | atgtaccgaaggaagaacgagaagcaatgacttcggcggcctgactcttatgaccagtggcgggatttgaaa |
| | atttaccgcaactgtcagcggaaaatagctgccctgatactgatttatctcgctgaaacgctgatggtgattgac |
| | catcagaaaaaaagcactcgtattcaggccagcctgtttgctccgaatgaagaagaaaaacaacgtctcactgc |
| | tcgcctgaacgaactacgtcagcaactgaccgaagccgcgccgccgctgccggtggtaccgtgccgcatat |
| | gcgagtgaatgtaaccagagcgatgaagagacggtggtgtagtgcgatgagcaaaaagcgattcgcgccg |
| | gagaaattaccaggtggtgccatctcgccgtactctctgccctgcccgtcaccgctggcagcctattacgtgct |
| | gaaaaagagtaatcccagcccgtacatgatatatgcaggataatgatttcaccctgatggcgcgtcgccggaa |
| | agacgctcaagtatgacgccaccagccgccagattgagatttacccgattgccggaacacgtccacgcggtc |
| | gtcgtgccgatggacgctggacagagacctcgacagccgcatcgaactggagatgcgtaccgatcataaag |
| | agctactgaacatctgatgctggtggatctcgcccgtaatgacctggcacgcatttgcacacccggcagccgc |
| | tacgtcgccgatctcaccaaagagaccgttactcttacgtgatgcacctagtctcccgcgagaggtgagctgc |
| | gccacgatctcgacgccctgcacgcttaccgcgcctgtatgaatatggggacgttaagcggtgcaccgaaagt |
| | acgcgctatgcagttaattgccgaagcagaaggtcgtcgacgcggcagctacggcggcgcggtaggttatat |
| | accgcgcatggcgatctcgacacctgcattgtgatccgctcggcgctggtggaaaacggtatcgccaccgtgc |
| | aagccggtgctggcgtagtccagattctgaccgcagtcggaagccgacgaaactcgtaataaagcccgcgc |
| | tgtactgcgcgctattgccaccgcgcatcatgcacaggagacgactaatggctgacattctgctgctcgataat |
| | atcgactcattacgtacaacctggcagatcagagcgcagcaatggtcataacgtggtgatttaccgcaaccata |
| | accggcgcagaccttaattgaacgcctggcgacgatgagcaatccggtgctgatgctactcctggccccggt |
| | gtgccgagcgaagccggagtatgccggaactcctcacccgcttgcgtggcaagctgccaattattggcatag |
| | cctcggacatcaggcgattgtcgaagcttacgggggctatgtcggtcaggcgggcgaaattcacacggtaaa |
| | gcgtcgagcattgaacatgacggtcaggcgatgatgccggattaacaaacccgctgccagtggcgcgttatc |
| | actcgctggaggcagtaacattccggccggataaccatcaacgcccatataatggcatggtgatggcggtgc |
| | gtcacgatgcagatcgcgtagtggattccagaccatccggaatccattcttactacccagggcgctcgcctgct |
| | ggaacaaacgctggcctgggcgcagcagaaactagagccaaccaacacgctgcaaccgattctggaaaaa |
| | ctgtatcaggcacagacgcttagccaacaagaaagccaccagctgattcagcggtggtacgtggcgagctga |
| | agccggaacaactggcggcggcgctggtgagcatgaaaattcgcggtgaacacccgaacgagatcgccgg |
| | ggcagcaaccgcgctactggaaaacgccgcgccattcccgcgcccggattatctgatgccgatatcgtcggt |
| | actggcggtgacggcagcaacagcatcaatatttctaccgccagtgcgtttgtcgccgcggcctgcgggctga |
| | aagtggcgaaacacggcaaccgtagcgtctccagtaaatccggctcgtcggatctgctggcggcgacggtat |
| | taatatgatatgaacgccgataaatcgcgccaggcgctggatgagttaggcgtctgatcctattgcgccgaa |
| | gtatcacaccggattccgccatgcgatgccggacgccagcaactgaaaacccgcactctgacaacgtgctg |
| | ggaccattgattaacccggcgcatccgccgctggcgctaattggtgatatagtccggaactggtgctgccgatt |
| | gccgaaaccagcgcgtgctggggtatcaacgcgcggcagtggtgcacagcggcgggatggatgaagatc |
| | attacacgcgccgacaatcgagccgaactacatgacggcgaaattaagagctatcaattgaccgctgaagatt |
| | ttggcctgacaccctaccaccaggagcaattggcaggcggaacaccggaagaaaaccgtgacattttaacac |
| | gcagttacaaggtaaaggcgacgccgcccatgaagcagccgtcgcggcgaatgtcgccatgaaatgcgcct |
| | gcatggccatgaagatctgcaagccaatgcgcaaaccgacttgaggtactgcgcagtggaccgcttacgaca |
| | gagtcaccgcactggcggcacgagggtaaatgatgcaaaccgattagcgaaaatcgtcgcagacaaggcg |
| | atttgggtagaaacccgcaaagagcagcaaccgctggccagttttcagaatgaggttcagccgagcacgcga |
| | cattatatgatgcacttcagggcgcacgcacggcgatattctggagtgtaaaaaagcgtcgccgtcaaaaggc |
| | gtgatccgtgatgatacgatccggcacgcattgccgccatttataaacattacgatcggcaatacagtgctgac |
| | tgatgagaaatattacaggggagattgatacctccccatcgtcagccaaatcgccccgcagccgatatatgta |
| | aagacacattatcgatccttaccagatctatctggcgcgctattaccaggccgatgcctgcttattaatgattcag |
| | tactggatgacgaacaatatcgccagcttgcagccgtcgcccacagtctggagatgggtgtgctgaccgaagt |
| | cagtaatgaagaggaactggagcgcgccattgcattgggggcaaaggtcgaggcatcaacaaccgcgatct |
| | gcgcgatagtcgattgatctcaaccgtacccgcgagcttgcgccgaaactggggcacaacgtgacggtaatc |
| | agcgaatccggcatcaatacttacgctcaggtgcgcgagttaagccacttcgctaacggctactgattggacg |
| | gcgttgatggcccatgacgatttgaacgccgccgtgcgtcgggtgttgctgggtgagaataaagtatgtggcct |
| | gacacgtgggcaagatgctaaagcagatatgacgcgggcgcgatttacggtgggttgatttttgttgcgacat |
| | caccgcgttgcgtcaacgttgaacaggcgcaggaagtgatggctgcagcaccgttgcagtatgttggcgtgtt |
| | ccgcaatcacgatattgccgatgtggcggacaaagctaaggtgttatcgctggcggcagtgcaactgcatggt |
| | aatgaagatcagctgtatatcgacaatctgcgtgaggctctgccagcacacgtcgccatctggaaggctttaag |
| | tgtcggtgaaactcttcccgcgcgcgattttcagcacatcgataaatatgtattcgacaacggtcagggcggga |
| | gcggacaacgtttcgactggtcactattaaatggtcaatcgcttggcaacgttctgctggcggggggcttaggc |
| | gcagataactgcgtggaagcggcacaaaccggctgcgccgggcttgattttaattctgctgtagagtcgcaac |
| | cgggtatcaaagacgcacgtcttttggcctcggttttccagacgctgcgcgcatattaaggaaaggaacaatga |
| | caacattacttaacccctattttggtgagtttggcggcatgtacgtgccacaaatcctgatgcctgctctgcgcca |
| | gctggaagaagcttttgtcagcgcgcaaaaagatcctgaatttcaggctcagttcaacgacctgctgaaaaact |
| | atgccgggcgtccaaccgcgctgaccaaatgccagaacattacagccgggacgaacaccacgctgtatctga |
| | agcgcgaagatttgctgcacggcggcgcgcataaaactaaccaggtgctcggtcaggctttactggcgaagc |
| | ggatgggtaaaactgaaattattgccgaaaccggtgccggtcagcatggcgtggcgtcggcccttgccagcg |
| | ccctgctcggcctgaaatgccgaatttatatgggtgccaaagacgttgaacgccagtcgcccaacgttttccgg |
| | atgcgcttaatgggtgcggaagtgatcccggtacatagcggttccgcgaccctgaaagatgcctgtaatgagg |
| | cgctacgcgactggtccggcagttatgaaaccgcgcactatatgctgggtaccgcagctggcccgcatcctta |
| | cccgaccattgtgcgtgagtttcagcggatgattggcgaagaaacgaaagcgcagattctggaaagagaagg |
| | tcgcctgccggatgccgttatcgcctgtgttggcggtggttcgaatgccatcggtatgtttgcagatttcatcaac |
| | gaaaccgacgtcggcctgattggtgtggagcctggcggccacggtatcgaaactggcgagcacggcgcacc |
| | gttaaaacatggtcgcgtgggcatctatttcggtatgaaagcgccgatgatgcaaaccgaagacgggcaaatt |
| | gaagagtcttactccatttctgccgggctggatttcccgtccgtcggcccgcaacatgcgtatctcaacagcact |
| | ggacgcgctgattacgtgtctattaccgacgatgaagccctggaagcctttaaaacgctttgcctgcatgaagg |
| | gatcatcccggcgctggaatcctcccacgccctggcccatgcgctgaaaatgatgcgcgaaaatccggaaaa |
| | agagcagctactggtggttaacctttccggtcgcggcgataaagacatcttcaccgttcacgatattttgaaagc |
| | acgaggggaaatctgatggaacgctacgaatctctgtttgcccagttgaaggagcgcaaagaaggcgcattc |
| | gttcctttcgtcaccctcggtgatccgggcattgagcagtcgttgaaaattatcgatacgctaattgaagccggtg |
| | ctgacgcgctggagttaggcatccccttctccgacccactggcggatggcccgacgattcaaaacgccacact |
| | gcgtgcttttgcggcgggagtaaccccggcgcagtgctttgagatgctggcactcattcgccagaagcacccg |
| | accattcccatcggccttttgatgtatgccaacctggtgtttaacaaaggcattgatgagttttatgccgagtgcga |
| | gaaagtcggcgtcgattcggtgctggttgccgatgtgcccgtggaagagtccgcgcccttccgccaggccgc |
| | gttgcgtcataatgtcgcacctatctttatttgcccgccgaatgccgacgatgatttgctgcgccagatagcctctt |
| | acggtcgtggttacacctatttgctgtcgcgagcgggcgtgaccggcgcagaaaaccgcgccgcgttacccc |
| | tcaatcatctggttgcgaagctgaaagagtacaacgctgcgcctccattgcagggatttggtatttccgccccgg |
| | atcaggtaaaagccgcgattgatgcaggagctgcgggcgcgatttctggttcggccatcgttaaaatcatcgag |
| | caacatattaatgagccagagaaaatgctggcggcactgaaagcttttgtacaaccgatgaaagcggcgacgc |
| | gcagttaatacgcatggcatggatgaCCGATGGTAGTGTGGGGTCTCCCCATGCG |
| | AGAGTAGGGAACTGCCAGGCATCAAATAAAACGAAAGGCTCAGT |
| | CGAAAGACTGGGCCTTTCGTTTTATCTGTTGTTTGTCGGTGAACGC |
| | TCTCCTGAGTAGGACAAATCCGCCGGGAGCGGATTTGAACGTTGC |
| | GAAGCAACGGCCCGGAGGGTGGCGGGCAGGACGCCCGCCATAAA |
| | CTGCCAGGCATCAAATTAAGCAGAAGGCCATCCTGACGGATGGCC |
| | TTTTTGCGTGGCCAGTGCCAAGCTTGCATGCGTGC |
| Tet repressor | taagacccactttcacatttaagttgatttctaatccgcatatgatcaattcaaggccgaataagaaggctggctct |
| SEQ ID | gcaccttggtgatcaaataattcgatagcttgtcgtaataatggcggcatactatcagtagtaggtgtttccctttct |
| NO: 124 | tctttagcgacttgatgctcttgatcttccaatacgcaacctaaagtaaaatgccccacagcgctgagtgcatata |
| | atgcattctctagtgaaaaaccttgaggcataaaaaggctaattgattttcgagagtttcatactgatttctgtagg |
| | ccgtgtacctaaatgtacttttgctccatcgcgatgacttagtaaagcacatctaaaacttttagcgttattacgtaa |
| | aaaatcttgccagctttccccttctaaagggcaaaagtgagtatggtgcctatctaacatctcaatggctaaggcg |
| | tcgagcaaagcccgcttattttttacatgccaatacaatgtaggctgctctacacctagcttctgggcgagtttacg |
| | ggttgttaaaccttcgattccgacctcattaagcagctctaatgcgctgttaatcactttacttttatctaatctagaca |
| | t |
| tetRitetA | cattaattcctaatttttgttgacactctatcattgatagagttattttaccactccctatcagtgatagagaaaagtga |
| promoters and | actctagaaataattttgtttaactttaagaaggagatatacat |
| RBS and | |
| leader region | |
| SEQ ID NO | |
| 125: | |
| trpE | atgcaaacacaaaaaccgactctcgaactgctaacctgcgaaggcgcttatcgcgacaacccgactgcgctttt |
| SEQ ID NO: | tcaccagttgtgtggggatcgtccggcaacgctgctgctggaatccgcagatatcgacagcaaagatgatttaa |
| 126 | aaagcctgctgctggtagacagtgcgctgcgcattacagcattaagtgacactgtcacaatccaggcgctttcc |
| | ggcaatggagaagccctgttgacactactggataacgccttgcctgcgggtgtggaaaatgaacaatcaccaa |
| | actgccgcgtactgcgcttcccgcctgtcagtccactgctggatgaagacgcccgcttatgctccctttcggtttt |
| | tgacgctttccgcttattacagaatctgttgaatgtaccgaaggaagaacgagaagcaatgttcttcggcggcct |
| | gttctcttatgaccttgtggcgggatttgaaaatttaccgcaactgtcagcggaaaatagctgccctgatttctgttt |
| | ttatctcgctgaaacgctgatggtgattgaccatcagaaaaaaagcactcgtattcaggccagcctgtttgctcc |
| | gaatgaagaagaaaaacaacgtctcactgctcgcctgaacgaactacgtcagcaactgaccgaagccgcgc |
| | cgccgctgccggtggtttccgtgccgcatatgcgttgtgaatgtaaccagagcgatgaagagttcggtggtgta |
| | gtgcgtttgttgcaaaaagcgattcgcgccggagaaattttccaggtggtgccatctcgccgtttctctctgccct |
| | gcccgtcaccgctggcagcctattacgtgctgaaaaagagtaatcccagcccgtacatgattttatgcaggata |
| | atgatttcaccctgtttggcgcgtcgccggaaagttcgctcaagtatgacgccaccagccgccagattgagattt |
| | acccgattgccggaacacgtccacgcggtcgtcgtgccgatggttcgctggacagagacctcgacagccgc |
| | atcgaactggagatgcgtaccgatcataaagagctttctgaacatctgatgctggtggatctcgcccgtaatgac |
| | ctggcacgcatttgcacacccggcagccgctacgtcgccgatctcaccaaagttgaccgttactcttacgtgat |
| | gcacctagtctcccgcgttgttggtgagctgcgccacgatctcgacgccctgcacgcttaccgcgcctgtatga |
| | atatggggacgttaagcggtgcaccgaaagtacgcgctatgcagttaattgccgaagcagaaggtcgtcgac |
| | gcggcagctacggcggcgcggtaggttattttaccgcgcatggcgatctcgacacctgcattgtgatccgctc |
| | ggcgctggtggaaaacggtatcgccaccgtgcaagccggtgctggcgtagtccttgattctgttccgcagtcg |
| | gaagccgacgaaactcgtaataaagcccgcgctgtactgcgcgctattgccaccgcgcatcatgcacaggag |
| | acgttcta |
| TrpE | MQTQKPTLELLTCEGAYRDNPTALFHQLCGDRPATLLLESADIDSKD |
| SEQ ID NO: | DLKSLLLVDSALRITALSDTVTIQALSGNGEALLTLLDNALPAGVENE |
| 127 | QSPNCRVLRFPPVSPLLDEDARLCSLSVFDAFRLLQNLLNVPKEEREA |
| | MFFGGLFSYDLVAGFENLPQLSAENSCPDFCFYLAETLMVIDHQKKST |
| | RIQASLFAPNEEEKQRLTARLNELRQQLTEAAPPLPVVSVPHMRCECN |
| | QSDEEFGGVVRLLQKAIRAGEIFQVVPSRRFSLPCPSPLAAYYVLKKS |
| | NPSPYMFFMQDNDFTLFGASPESSLKYDATSRQIEIYPIAGTRPRGRRA |
| | DGSLDRDLDSRIELEMRTDHKELSEHLMLVDLARNDLARICTPGSRY |
| | VADLTKVDRYSYVMHLVSRVVGELRHDLDALHAYRACMNMGTLSG |
| | APKVRAMQLIAEAEGRRRGSYGGAVGYFTAHGDLDTCIVIRSALVEN |
| | GIATVQAGAGVVLDSVPQSEADETRNKARAVLRAIATAHHAQETF |
| trpD | atggctgacattctgctgctcgataatatcgactcttttacgtacaacctggcagatcagttgcgcagcaatggtc |
| SEQ ID NO: | ataacgtggtgatttaccgcaaccatattccggcgcagaccttaattgaacgcctggcgacgatgagcaatccg |
| 128 | gtgctgatgctttctcctggccccggtgtgccgagcgaagccggttgtatgccggaactcctcacccgcttgcg |
| | tggcaagctgccaattattggcatttgcctcggacatcaggcgattgtcgaagcttacgggggctatgtcggtca |
| | ggcgggcgaaattcttcacggtaaagcgtcgagcattgaacatgacggtcaggcgatgtttgccggattaaca |
| | aacccgctgccagtggcgcgttatcactcgctggttggcagtaacattccggccggtttaaccatcaacgccca |
| | ttttaatggcatggtgatggcggtgcgtcacgatgcagatcgcgtttgtggattccagttccatccggaatccatt |
| | cttactacccagggcgctcgcctgctggaacaaacgctggcctgggcgcagcagaaactagagccaaccaa |
| | cacgctgcaaccgattctggaaaaactgtatcaggcacagacgcttagccaacaagaaagccaccagctgttt |
| | tcagcggtggtacgtggcgagctgaagccggaacaactggcggcggcgctggtgagcatgaaaattcgcgg |
| | tgaacacccgaacgagatcgccggggcagcaaccgcgctactggaaaacgccgcgccattcccgcgcccg |
| | gattatctgtttgccgatatcgtcggtactggcggtgacggcagcaacagcatcaatatttctaccgccagtgcg |
| | tttgtcgccgcggcctgcgggctgaaagtggcgaaacacggcaaccgtagcgtctccagtaaatccggctcg |
| | tcggatctgctggcggcgttcggtattaatcttgatatgaacgccgataaatcgcgccaggcgctggatgagtta |
| | ggcgtctgtttcctctttgcgccgaagtatcacaccggattccgccatgcgatgccggttcgccagcaactgaa |
| | aacccgcactctgttcaacgtgctgggaccattgattaacccggcgcatccgccgctggcgctaattggtgttta |
| | tagtccggaactggtgctgccgattgccgaaaccttgcgcgtgctggggtatcaacgcgcggcagtggtgca |
| | cagcggcgggatggatgaagtttcattacacgcgccgacaatcgttgccgaactacatgacggcgaaattaag |
| | agctatcaattgaccgctgaagattttggcctgacaccctaccaccaggagcaattggcaggcggaacaccgg |
| | aagaaaaccgtgacattttaacacgcttgttacaaggtaaaggcgacgccgcccatgaagcagccgtcgcgg |
| | cgaatgtcgccatgttaatgcgcctgcatggccatgaagatctgcaagccaatgcgcaaaccgttcttgaggta |
| | ctgcgcagtggttccgcttacgacagagtcaccgcactggcggcacgagggtaa |
| TrpD | MADILLLDNIDSFTYNLADQLRSNGHNVVIYRNHIPAQTLIERLATMS |
| SEQ ID NO: | NPVLMLSPGPGVPSEAGCMPELLTRLRGKLPIIGICLGHQAIVEAYGG |
| 129 | YVGQAGEILHGKASSIEHDGQAMFAGLTNPLPVARYHSLVGSNIPAG |
| | LTINAHFNGMVMAVRHDADRVCGFQFHPESILTTQGARLLEQTLAW |
| | AQQKLEPTNTLQPILEKLYQAQTLSQQESHQLFSAVVRGELKPEQLAA |
| | ALVSMKIRGEHPNEIAGAATALLENAAPFPRPDYLFADIVGTGGDGSN |
| | SINISTASAFVAAACGLKVAKHGNRSVSSKSGSSDLLAAFGINLDMNA |
| | DKSRQALDELGVCFLFAPKYHTGFRHAMPVRQQLKTRTLFNVLGPLI |
| | NPAHPPLALIGVYSPELVLPIAETLRVLGYQRAAVVHSGGMDEVSLH |
| | APTIVAELHDGEIKSYQLTAEDFGLTPYHQEQLAGGTPEENRDILTRLL |
| | QGKGDAAHEAAVAANVAMLMRLHGHEDLQANAQTVLEVLRSGSA |
| | YDRVTALAARG |
| trpC | atgcaaaccgttttagcgaaaatcgtcgcagacaaggcgatttgggtagaaacccgcaaagagcagcaaccg |
| SEQ ID NO: | ctggccagttttcagaatgaggttcagccgagcacgcgacatttttatgatgcacttcagggcgcacgcacggc |
| 130 | gtttattctggagtgtaaaaaagcgtcgccgtcaaaaggcgtgatccgtgatgatttcgatccggcacgcattgc |
| | cgccatttataaacattacgcttcggcaatttcagtgctgactgatgagaaatattttcaggggagctttgatttcct |
| | ccccatcgtcagccaaatcgccccgcagccgattttatgtaaagacttcattatcgatccttaccagatctatctg |
| | gcgcgctattaccaggccgatgcctgcttattaatgctttcagtactggatgacgaacaatatcgccagcttgca |
| | gccgtcgcccacagtctggagatgggtgtgctgaccgaagtcagtaatgaagaggaactggagcgcgccatt |
| | gcattgggggcaaaggtcgttggcatcaacaaccgcgatctgcgcgatttgtcgattgatctcaaccgtacccg |
| | cgagcttgcgccgaaactggggcacaacgtgacggtaatcagcgaatccggcatcaatacttacgctcaggt |
| | gcgcgagttaagccacttcgctaacggctttctgattggttcggcgttgatggcccatgacgatttgaacgccgc |
| | cgtgcgtcgggtgttgctgggtgagaataaagtatgtggcctgacacgtgggcaagatgctaaagcagcttat |
| | gacgcgggcgcgatttacggtgggttgatttttgttgcgacatcaccgcgttgcgtcaacgttgaacaggcgca |
| | ggaagtgatggctgcagcaccgttgcagtatgttggcgtgttccgcaatcacgatattgccgatgtggcggaca |
| | aagctaaggtgttatcgctggcggcagtgcaactgcatggtaatgaagatcagctgtatatcgacaatctgcgt |
| | gaggctctgccagcacacgtcgccatctggaaggctttaagtgtcggtgaaactcttcccgcgcgcgattttca |
| | gcacatcgataaatatgtattcgacaacggtcagggcgggagcggacaacgtttcgactggtcactattaaatg |
| | gtcaatcgcttggcaacgttctgctggcggggggcttaggcgcagataactgcgtggaagcggcacaaaccg |
| | gctgcgccgggcttgattttaattctgctgtagagtcgcaaccgggtatcaaagacgcacgtcttttggcctcggt |
| | tttccagacgctgcgcgcatattaa |
| TrpC | MQTVLAKIVADKAIWVETRKEQQPLASFQNEVQPSTRHFYDALQGA |
| SEQ ID NO: | RTAFILECKKASPSKGVIRDDFDPARIAAIYKHYASAISVLTDEKYFQG |
| 131 | SFDFLPIVSQIAPQPILCKDFIIDPYQIYLARYYQADACLLMLSVLDDEQ |
| | YRQLAAVAHSLEMGVLTEVSNEEELERAIALGAKVVGINNRDLRDLS |
| | IDLNRTRELAPKLGHNVTVISESGINTYAQVRELSHFANGFLIGSALM |
| | AHDDLNAAVRRVLLGENKVCGLTRGQDAKAAYDAGAIYGGLIFVAT |
| | SPRCVNVEQAQEVMAAAPLQYVGVFRNHDIADVADKAKVLSLAAV |
| | QLHGNEDQLYIDNLREALPAHVAIWKALSVGETLPARDFQHIDKYVF |
| | DNGQGGSGQRFDWSLLNGQSLGNVLLAGGLGADNCVEAAQTGCAG |
| | LDFNSAVESQPGIKDARLLASVFQTLRAY |
| trpB | atgacaacattacttaacccctattttggtgagtttggcggcatgtacgtgccacaaatcctgatgcctgctctgcg |
| SEQ ID NO: | ccagctggaagaagcttttgtcagcgcgcaaaaagatcctgaatttcaggctcagttcaacgacctgctgaaaa |
| 132 | actatgccgggcgtccaaccgcgctgaccaaatgccagaacattacagccgggacgaacaccacgctgtatc |
| | tgaagcgcgaagatttgctgcacggcggcgcgcataaaactaaccaggtgctcggtcaggctttactggcga |
| | agcggatgggtaaaactgaaattattgccgaaaccggtgccggtcagcatggcgtggcgtcggcccttgcca |
| | gcgccctgctcggcctgaaatgccgaatttatatgggtgccaaagacgttgaacgccagtcgcccaacgttttc |
| | cggatgcgcttaatgggtgcggaagtgatcccggtacatagcggttccgcgaccctgaaagatgcctgtaatg |
| | aggcgctacgcgactggtccggcagttatgaaaccgcgcactatatgctgggtaccgcagctggcccgcatc |
| | cttacccgaccattgtgcgtgagtttcagcggatgattggcgaagaaacgaaagcgcagattctggaaagaga |
| | aggtcgcctgccggatgccgttatcgcctgtgttggcggtggttcgaatgccatcggtatgtttgcagatttcatc |
| | aacgaaaccgacgtcggcctgattggtgtggagcctggcggccacggtatcgaaactggcgagcacggcgc |
| | accgttaaaacatggtcgcgtgggcatctatttcggtatgaaagcgccgatgatgcaaaccgaagacgggcaa |
| | attgaagagtcttactccatttctgccgggctggatttcccgtccgtcggcccgcaacatgcgtatctcaacagc |
| | actggacgcgctgattacgtgtctattaccgacgatgaagccctggaagcctttaaaacgctttgcctgcatgaa |
| | gggatcatcccggcgctggaatcctcccacgccctggcccatgcgctgaaaatgatgcgcgaaaatccggaa |
| | aaagagcagctactggtggttaacctttccggtcgcggcgataaagacatcttcaccgttcacgatattttgaaa |
| | gcacgaggggaaatctga |
| TrpB | MTTLLNPYFGEFGGMYVPQILMPALRQLEEAFVSAQKDPEFQAQFND |
| SEQ ID NO: | LLKNYAGRPTALTKCQNITAGTNTTLYLKREDLLHGGAHKTNQVLG |
| 133 | QALLAKRMGKTEIIAETGAGQHGVASALASALLGLKCRIYMGAKDV |
| | ERQSPNVFRMRLMGAEVIPVHSGSATLKDACNEALRDWSGSYETAH |
| | YMLGTAAGPHPYPTIVREFQRMIGEETKAQILEREGRLPDAVIACVGG |
| | GSNAIGMFADFINETDVGLIGVEPGGHGIETGEHGAPLKHGRVGIYFG |
| | MKAPMMQTEDGQIEESYSISAGLDFPSVGPQHAYLNSTGRADYVSIT |
| | DDEALEAFKTLCLHEGIIPALESSHALAHALKMMRENPEKEQLLVVN |
| | LSGRGDKDIFTVHDILKARGEI |
| trpA | atggaacgctacgaatctctgtttgcccagttgaaggagcgcaaagaaggcgcattcgttcctttcgtcaccctc |
| SEQ ID NO: | ggtgatccgggcattgagcagtcgttgaaaattatcgatacgctaattgaagccggtgctgacgcgctggagtt |
| 134 | aggcatccccttctccgacccactggcggatggcccgacgattcaaaacgccacactgcgtgcttttgcggcg |
| | ggagtaaccccggcgcagtgctttgagatgctggcactcattcgccagaagcacccgaccattcccatcggcc |
| | ttttgatgtatgccaacctggtgtttaacaaaggcattgatgagttttatgccgagtgcgagaaagtcggcgtcga |
| | ttcggtgctggttgccgatgtgcccgtggaagagtccgcgcccttccgccaggccgcgttgcgtcataatgtcg |
| | cacctatctttatttgcccgccgaatgccgacgatgatttgctgcgccagatagcctcttacggtcgtggttacac |
| | ctatttgctgtcgcgagcgggcgtgaccggcgcagaaaaccgcgccgcgttacccctcaatcatctggttgcg |
| | aagctgaaagagtacaacgctgcgcctccattgcagggatttggtatttccgccccggatcaggtaaaagccg |
| | cgattgatgcaggagctgcgggcgcgatttctggttcggccatcgttaaaatcatcgagcaacatattaatgagc |
| | cagagaaaatgctggcggcactgaaagcttttgtacaaccgatgaaagcggcgacgcgcagttaa |
| TrpA | MERYESLFAQLKERKEGAFVPFVTLGDPGIEQSLKIIDTLIEAGADALE |
| SEQ ID NO: | LGIPFSDPLADGPTIQNATLRAFAAGVTPAQCFEMLALIRQKHPTIPIGL |
| 135 | LMYANLVFNKGIDEFYAECEKVGVDSVLVADVPVEESAPFRQAALR |
| | HNVAPIFICPPNADDDLLRQIASYGRGYTYLLSRAGVTGAENRAALPL |
| | NHLVAKLKEYNAAPPLQGFGISAPDQVKAAIDAGAAGAISGSAIVKII |
| | EQHINEPEKMLAALKAFVQPMKAATRS |

[0503] In some embodiments, the genetically engineered bacteria comprise one or more nucleic acid sequence of Table 14 or a functional fragment thereof. In some embodiments, the genetically engineered bacteria comprise a nucleic acid sequence that, but for the redundancy of the genetic code, encodes the same polypeptide as one or more nucleic acid sequence of Table 14 or a functional fragment thereof. In some embodiments, genetically engineered bacteria comprise a nucleic acid sequence that is at least about 80%, at least about 85%, at least about 90%, at least about 95%, or at least about 99% homologous to the DNA sequence of one or more nucleic acid sequence of Table 14 or a functional fragment thereof, or a nucleic acid sequence that, but for the redundancy of the genetic code, encodes the same polypeptide as one or more nucleic acid sequence of Table 14 or a functional fragment thereof.

[0504] Accordingly, in one embodiment, one or more polypeptides and/or polynucleotides expressed by the genetically engineered bacteria have at least about 80%, 81%, 82%, 83%, 84%, 85%, 86%, 87%, 88%, 89%, 90%, 91%, 92%, 93%, 94%, 95%, 96%, 97%, 98%, or 99% identity with one or more of SEQ ID NO: 123 through SEQ ID NO: 135. In another embodiment, one or more polynucleotides and/or polypeptides encoded and expressed by the genetically engineered bacteria comprise the sequence of one or more of SEQ ID NO: 123 through SEQ ID NO: 135. In another embodiment, one or more polynucleotides and/or polypeptides encoded and expressed by the genetically engineered bacteria consist of the sequence of one or more of SEQ ID NO: 123 through SEQ ID NO: 135.

[0505] Table 15 depicts exemplary polypeptide sequences feedback resistant AroG and TrpE. Table 15 also depicts an exemplary TnaA (tryptophanase from E. coli ) sequence. IN some embodiments, the sequence is encoded in circuits for tryptophan catabolism to indole; in other embodimetns, the sequence is deleted from the E coli chromosome to increase levels of tryptophan.

TABLE 15
Feedback resistant AroG and TrpE and tryptophanase sequences

| Description | Sequence |
|---|---|
| Aro Gfbr: feedback | MNYQNDDLRIKEIKELLPPVALLEKFPATENAANTVAHARKAI |
| resistant 2-dehydro- | HKILKGNDDRLLVVIGPCSIHDPVAAKEYATRLLTLREELQDE |
| 3- | LEIVMRVYFEKPRTTVGWKGLINDPHMDNSFQINDGLRIARK |
| deoxyphospho- | LLLDINDSGLPAAGEFLDMITLQYLADLMSWGAIGARTTESQ |
| heptonate aldolase | VHRELASGLSCPVGFKNGTDGTIKVAIDAINAAGAPHCFLSVT |
| from E. coli | KWGHSAIVNTSGNGDCHIILRGGKEPNYSAKHVAEVKEGLNK |
| SEQ ID NO: 136 | AGLPAQVMIDFSHANSSKQFKKQMDVCTDVCQQIAGGEKAII |
| | GVMVESHLVEGNQSLESGEPLAYGKSITDACIGWDDTDALLR |
| | QLASAVKARRG |
| TrpEfbr: feedback | MQTQKPTLELLTCEGAYRDNPTALFHQLCGDRPATLLLEFADI |
| resistant | DSKDDLKSLLLVDSALRITALSDTVTIQALSGNGEALLTLLDN |
| anthranilate | ALPAGVENEQSPNCRVLRFPPVSPLLDEDARLCSLSVFDAFRL |
| synthase | LQNLLNVPKEEREAMFFGGLFSYDLVAGFENLPQLSAENSCP |
| component I from | DFCFYLAETLMVIDHQKKSTRIQASLFAPNEEEKQRLTARLNE |
| E. coli | LRQQLTEAAPPLPVVSVPHMRCECNQSDEEFGGVVRLLQKAI |
| SEQ ID NO: 137 | RAGEIFQVVPSRRFSLPCPSPLAAYYVLKKSNPSPYMFFMQDN |
| | DFTLFGASPESSLKYDATSRQIEIYPIAGTRPRGRRADGSLDRD |
| | LDSRIELEMRTDHKELSEHLMLVDLARNDLARICTPGSRYVA |
| | DLTKVDRYSYVMHLVSRVVGELRHDLDALHAYRACMNMGT |
| | LSGAPKVRAMQLIAEAEGRRRGSYGGAVGYFTAHGDLDTCIV |
| | IRSALVENGIATVQAGAGVVLDSVPQSEADETRNKARAVLRA |
| | IATAHHAQETF |
| SerA: 2- | MAKVSLEKDKIKFLLVEGVHQKALESLRAAGYTNIEFHKGAL |
| oxoglutarate | DDEQLKESIRDAHFIGLRSRTHLTEDVINAAEKLVAIGCFCIGT |
| reductase from E. | NQVDLDAAAKRGIPVFNAPFSNTRSVAELVIGELLLLLRGVPE |
| coli Nissle | ANAKAHRGVWNKLAAGSFEARGKKLGIIGYGHIGTQLGILAE |
| SEQ ID NO: 137 | SLGMYVYFYDIENKLPLGNATQVQHLSDLLNMSDVVSLHVPE |
| | NPSTKNMMGAKEISLMKPGSLLINASRGTVVDIPALCDALASK |
| | HLAGAAIDVFPTEPATNSDPFTSPLCEFDNVLLTPHIGGSTQEA |
| | QENIGLEVAGKLIKYSDNGSTLSAVNFPEVSLPLHGGRRLMHI |
| | HENRPGVLTALNKIFAEQGVNIAAQYLQTSAQMGYVVIDIEA |
| | DEDVAEKALQAMKAIPGTIRARLLY |
| SerAfbr: feedback | MAKVSLEKDKIKFLLVEGVHQKALESLRAAGYTNIEFHKGAL |
| resistant 2- | DDEQLKESIRDAHFIGLRSRTHLTEDVINAAEKLVAIGCFCIGT |
| oxoglutarate | NQVDLDAAAKRGIPVFNAPFSNTRSVAELVIGELLLLLRGVPE |
| reductase from E. | ANAKAHRGVWNKLAAGSFEARGKKLGIIGYGHIGTQLGILAE |
| coli Nissle | SLGMYVYFYDIENKLPLGNATQVQHLSDLLNMSDVVSLHVPE |
| SEQ ID NO: 139 | NPSTKNMMGAKEISLMKPGSLLINASRGTVVDIPALCDALASK |
| | HLAGAAIDVFPTEPATNSDPFTSPLCEFDNVLLTPHIGGSTQEA |
| | QENIGLEVAGKLIKYSDNGSTLSAVNFPEVSLPLHGGRRLMHI |
| | AEARPGVLTALNKIFAEQGVNIAAQYLQTSAQMGYVVIDIEA |
| | DEDVAEKALQAMKAIPGTIRARLLY |
| TnaA: | MENFKHLPEPFRIRVIEPVKRTTRAYREEAIIKSGMNPFLLDSE |
| tryptophanase from | DVFIDLLTDSGTGAVTQSMQAAMMRGDEAYSGSRSYYALAE |
| E. coli | SVKNIFGYQYTIPTHQGRGAEQIYIPVLIKKREQEKGLDRSKM |
| SEQ ID NO: 140 | VAFSNYFFDTTQGHSQINGCTVRNVYIKEAFDTGVRYDFKGN |
| | FDLEGLERGIEEVGPNNVPYIVATITSNSAGGQPVSLANLKVM |
| | YSIAKKYDIPVVMDSARFAENAYFIKQREAEYKDWTIEQITRE |
| | TYKYADMLAMSAKKDAMVPMGGLLCMKDDSFFDVYTECRT |
| | LCVVQEGFPTYGGLEGGAMERLAVGLYDGMNLDWLAYRIA |
| | QVQYLVDGLEEIGVVCQQAGGHAAFVDAGKLLPHIPADQFPA |
| | QALACELYKVAGIRAVEIGSFLLGRDPKTGKQLPCPAELLRLTI |
| | PRATYTQTHMDFIIEAFKHVKENAANIKGLTFTYEPKVLRHFT |
| | AKLKEV |

[0506] In one embodiment, one or more polypeptides encoded and expressed by the genetically engineered bacteria have at least about 80% identity with one or more of SEQ ID NO: 136 through SEQ ID NO: 139. In one embodiment, one or more polypeptides encoded and expressed by the genetically engineered bacteria have at least about 85% identity with one or more of SEQ ID NO: 136 through SEQ ID NO: 139. In one embodiment, one or more polypeptides encoded and expressed by the genetically engineered bacteria have at least about 90% identity with one or more of SEQ ID NO: 136 through SEQ ID NO: 139. In one embodiment, one or more polypeptides and/or polynucleotides encoded and expressed by the genetically engineered bacteria have at least about 95% identity with one or more of SEQ ID NO: 136 through SEQ ID NO: 139. In one embodiment, one or more polypeptides and/or polynucleotides encoded and expressed by the genetically engineered bacteria have have at least about 96%, 97%, 98%, or 99% identity with one or more of SEQ ID NO: 136 through SEQ ID NO: 139. Accordingly, in one embodiment, one or more polypeptides expressed by the genetically engineered bacteria have at least about 80%, 81%, 82%, 83%, 84%, 85%, 86%, 87%, 88%, 89%, 90%, 91%, 92%, 93%, 94%, 95%, 96%, 97%, 98%, or 99% identity with one or more of SEQ ID NO: 136 through SEQ ID NO: 139. In another embodiment, one or more polynucleotides and/or polypeptides encoded and expressed by the genetically engineered bacteria comprise the sequence of one or more of SEQ ID NO: 136 through SEQ ID NO: 139. In another embodiment, one or more polypeptides encoded and expressed by the genetically engineered bacteria consist of the sequence of one or more of SEQ ID NO: 136 through SEQ ID NO: 139.

[0507] In some embodiments, the endogenous TnaA polypeptide comprising SEQ ID NO: 140 is mutated or deleted.

[0508] In some embodiments, the genetically engineered bacteria are capable of expressing any one or more of the described circuits in low-oxygen conditions, in the presence of disease or tissue specific molecules or metabolites, in the presence of molecules or metabolites associated with inflammation or an inflammatory response or immune suppression, liver damage, metabolic disease, or in the presence of some other metabolite that may or may not be present in the gut, such as arabinose and others described herein. In some embodiments, the gene sequences(s) are controlled by a constitutive promoter. In some embodiments, the gene sequences(s) are controlled by an inducible and/or constritutive promoter, and are expressed during bacterial culture in vitro, e.g., for bacterial expansion, production and/or manufacture, as described herein.

[0509] In some embodiments, any one or more of the described circuits are present on one or more plasmids (e.g., high copy or low copy) or are integrated into one or more sites in the bacterial chromosome. Also, in some embodiments, the genetically engineered bacteria are further capable of expressing any one or more of the described circuits and further comprise one or more of the following: (1) one or more auxotrophies, such as any auxotrophies known in the art and provided herein, e.g., thyA auxotrophy, (2) one or more kill switch circuits, such as any of the kill-switches described herein or otherwise known in the art, (3) one or more antibiotic resistance circuits, (4) one or more transporters for importing biological molecules or substrates, such any of the transporters described herein or otherwise known in the art, (5) one or more secretion circuits, such as any of the secretion circuits described herein and otherwise known in the art, and (6) combinations of one or more of such additional circuits.

### Producing Kynurenic Acid

[0510] In some embodiments, the genetically engineered bacteria are capable of producing kynurenic acid. Kynurenic acid is produced from the irreversible transamination of kynurenine in a reaction catalyzed by the enzyme kynurenine--oxoglutarate transaminase.

[0511] In some embodiments, the gene or genes for producing kynurenic acid is modified and/or mutated, e.g., to enhance stability, increase kynurenic acid production under inducing conditions. In some embodiments, the genetically engineered bacteria are capable of producing kynurenic acid under inducing conditions, e.g., under a condition(s) associated with inflammation. In some embodiments, the genetically engineered bacteria are capable of producing kynurenic acid in low-oxygen conditions, in the presence of certain molecules or metabolites, in the presence of molecules or metabolites associated with liver damage, metabolic disease, inflammation or an inflammatory response, or in the presence of some other metabolite that may or may not be present in the gut, such as arabinose. In some embodiments, the gene sequences(s) are controlled by a constitutive promoter. In some embodiments, the gene sequences(s) are controlled by an inducible promoter. In some embodiments, the gene sequences(s) are controlled by an inducible and/or constritutive promoter, and are expressed during bacterial culture in vitro, e.g., for bacterial expansion, production and/or manufacture, as described herein.

[0512] In some embodiments, the genetically engineered bacteria comprising one or more gene(s) or gene cassette(s) can alter the TRP:KYNA ratio, e.g. in the circulation. In some embodiments the TRP:KYNA ratio is increased. In some embodiments, TRP:KYNA ratio is decreased.

[0513] In some embodiments, the genetically engineered bacteria comprise one or more gene(s) or gene cassette(s) for the consumption of tryptophan and production of kynurenic acid, which are bacterially derived. In some embodiments, the enzymes for producing kynureic acid are derived from one or more of Pseudomonas, Xanthomonas, Burkholderia, Stenotrophomonas, Shewanella, and Bacillus, and/or members of the families Rhodobacteraceae, Micrococcaceae, and Halomonadaceae, In some embodiments the enzymes are derived from the species listed in table S7 of Vujkovic-Cvijin et al. (Dysbiosis of the gut microbiota is associated with HIV diseaseprogression and tryptophan catabolism Sci Transl Med. 2013 Jul. 10; 5(193): 193ra91), the contents of which is herein incorporated by reference in its entirety.

[0514] In some embodiments, the genetically engineered bacteria comprise gene sequence(s) encoding one or more tryptophan transporters and gene sequence(s) encoding kynureninase. In some embodiments, the genetically engineered bacteria comprise gene sequence(s) encoding one or more tryptophan transporters and gene sequence(s) encoding one or more kynurenine--oxoglutarate transaminases (kynurenine aminotransferases). In some embodiments, the genetically engineered bacteria comprise gene sequence(s) encoding one or more tryptophan transporters, gene sequence(s) encoding kynureninase, and gene sequence(s) encoding one or more kynurenine--oxoglutarate transaminases (kynurenine aminotransferases). In some embodiments, the genetically engineered bacteria comprise gene sequence(s) encoding kynureninase and gene sequence(s) encoding one or more kynurenine aminotransferases.

[0515] In one embodiment, the genetically engineered bacteria comprise one or more gene sequence(s) which encode one or more tryptophan catabolism enzymes, which produce kynurenic acid from tryptophan. Non-limiting example of such gene sequence(s) are shown FIG. 37F and described elsewhere herein. In one embodiment, the genetically engineered bacteria comprise one or more gene sequence(s) which encode IDO1(indoleamine 2,3-dioxygenase). In one embodiment, the genetically engineered bacteria comprise one or more gene sequence(s) which encode IDO1 from homo sapiens. In one embodiment, the genetically engineered bacteria comprise one or more gene sequence(s) which encode TDO2 (tryptophan 2,3-dioxygenase). In one embodiment, the genetically engineered bacteria comprise one or more gene sequence(s) which encode TDO2 from homo sapiens. In one embodiment, the genetically engineered bacteria comprise one or more gene sequence(s) which encode BNA2 (indoleamine 2,3-dioxygenase). In one embodiment, the genetically engineered bacteria comprise one or more gene sequence(s) which encode BNA2 from S. cerevisiae). In one embodiment, the genetically engineered bacteria comprise one or more gene sequence(s) which encode Afmid: Kynurenine formamidase. In one embodiment, the genetically engineered bacteria comprise one or more gene sequence(s) which encode Afmid: Kynurenine formamidase from mouse. In one embodiment, the genetically engineered bacteria comprise one or more gene sequence(s) which encode Afmid in combination with one or more of idol and/or tdo2 and/or bna2. In one embodiment, the genetically engineered bacteria comprise one or more gene sequence(s) which encode Afmid in combination with ID01. In one embodiment, the genetically engineered bacteria comprise one or more gene sequence(s) which encode BNA2 in combination with TDO2. In one embodiment, the genetically engineered bacteria comprise one or more gene sequence(s) which encode Afmid in combination with bna2. In one embodiment, the genetically engineered bacteria further comprise one or more gene sequence(s) which encode cclbl and/or cc1b2 and/or aadat and/or got2.In one embodiment, the genetically engineered bacteria comprise one or more gene sequence(s) which encode BNA3 (kynurenine--oxoglutarate transaminase. In one embodiment, the genetically engineered bacteria comprise one or more gene sequence(s) which encode BNA3 from S. cerevisae. In one embodiment, the genetically engineered bacteria comprise one or more gene sequence(s) which encode BNA2 in combination with one or more of idol and/or tdo2 and/or bna2. In one embodiment, the genetically engineered bacteria comprise one or more gene sequence(s) which encode BNA2 in combination with idol. In one embodiment, the genetically engineered bacteria comprise one or more gene sequence(s) which encode BNA2 in combination with tdo2. In one embodiment, the genetically engineered bacteria comprise one or more gene sequence(s) which encode BNA2 in combination with bna2. In one embodiment, the genetically engineered bacteria further comprise one or more gene sequence(s) which encode cclbl and/or cc1b2 and/or aadat and/or got2.In one embodiment, the genetically engineered bacteria comprise one or more gene sequence(s) which encode one or more of idol and/or tdo2 and/or bna2.

[0516] In one embodiment, the genetically engineered bacteria comprise one or more gene sequence(s) which encode one or more of afmid and/or bna3.In one embodiment, the genetically engineered bacteria comprise one or more gene sequence(s) which encode one or more of idol and/or tdo2 and/or bna2, in combination with one or more of afmid and/or bna3.In one embodiment, the genetically engineered bacteria comprise one or more gene sequence(s) which encode GOT2 (Aspartate aminotransferase, mitochondrial). In one embodiment, the genetically engineered bacteria comprise one or more gene sequence(s) which encode GOT2 from homo sapiens.In one embodiment, the genetically engineered bacteria comprise one or more gene sequence(s) which encode AADAT (Kynurenine/alpha-aminoadipate aminotransferase, mitochondrial). In one embodiment, the genetically engineered bacteria comprise one or more gene sequence(s) which encode AADAT from homo sapiens. In one embodiment, the genetically engineered bacteria comprise one or more gene sequence(s) which encode CCLB1 (Kynurenine--oxoglutarate transaminase). In one embodiment, the genetically engineered bacteria comprise one or more gene sequence(s) which encode CCLB1 from homo sapiens). In one embodiment, the genetically engineered bacteria comprise one or more gene sequence(s) which encode CCLB2 (kynurenine--oxoglutarate transaminase 3) In one embodiment, the genetically engineered bacteria comprise one or more gene sequence(s) which encode CCLB2 from homo sapiens. In one embodiment, the genetically engineered bacteria comprise one or more gene sequence(s) which encode cc1b1 and/or cc1b2 and/or aadat and/or got2.In one embodiment, the genetically engineered bacteria comprise one or more gene sequence(s) which encode one or more of idol and/or tdo2 and/or bna2, in combination with one or more of afmid and/or bna3, and in combination with one or more of cc1b1 and/or cc1b2 and/or aadat and/or got2.

[0517] In any of these embodiments, the genetically engineered bacteria which produce kynurenic acid from tryptophan also optionally comprise one or more gene sequence(s) comprising one or more enzymes for tryptophan production, and gene deletions/or mutations as depicted and described in FIG. 36, FIG. 40A and/or FIG. 40B and described elsewhere herein. In some embodiments, the genetically engineered bacteria which produce kynurenic acid from tryptophan also optionally comprise one or more gene sequence(s) which encode one or more transporter(s) as described herein, through which tryptophan can be imported. Optionally, in some embodiments, the genetically engineered bacteria which produce kynurenic acid from tryptophan also optionally comprise one or more gene sequence(s) which encode an exporter as described herein, which can export tryptophan or any of its metabolites.

[0518] In some embodiments, the one or more genes for producing kynurenic acid are modified and/or mutated, e.g., to enhance stability, increase kynurenic acid production under inducing conditions. In some embodiments, the engineered bacteria have enhanced uptake or import of tryptophan, e.g., comprise a transporter or other mechanism for increasing the uptake of tryptophan into the bacterial cell. In some embodiments, the genetically engineered bacteria are capable of producing kynurenic acid under inducing conditions, e.g., under a condition(s) associated with inflammation. In some embodiments, the genetically engineered bacteria are capable of producing kynurenic acid in low-oxygen conditions, in the presence of certain molecules or metabolites, in the presence of molecules or metabolites associated with liver damage, metabolic disease, inflammation or an inflammatory response, or in the presence of some other metabolite that may or may not be present in the gut, such as arabinose.

[0519] In some embodiments, the gene sequences(s) are controlled by an inducible promoter. In some embodiments, the gene sequences(s) are controlled by a constitutive promoter. In some embodiments, the gene sequences(s) are controlled by an inducible and/or constritutive promoter, and are expressed during bacterial culture in vitro, e.g., for bacterial expansion, production and/or manufacture, as described herein.

[0520] In some embodiments, the genetically engineered bacteria are capable of expressing any one or more of the described circuits in low-oxygen conditions, in the presence of disease or tissue specific molecules or metabolites, in the presence of molecules or metabolites associated with inflammation or an inflammatory response or immune suppression, liver damage, metabolic disease, or in the presence of some other metabolite that may or may not be present in the gut, such as arabinose and others described herein. In some embodiments, any one or more of the described circuits are present on one or more plasmids (e.g., high copy or low copy) or are integrated into one or more sites in the bacterial chromosome. Also, in some embodiments, the genetically engineered bacteria are further capable of expressing any one or more of the described circuits and further comprise one or more of the following: (1) one or more auxotrophies, such as any auxotrophies known in the art and provided herein, e.g., thyA auxotrophy, (2) one or more kill switch circuits, such as any of the kill-switches described herein or otherwise known in the art, (3) one or more antibiotic resistance circuits, (4) one or more transporters for importing biological molecules or substrates, such any of the transporters described herein or otherwise known in the art, (5) one or more secretion circuits, such as any of the secretion circuits described herein and otherwise known in the art, and (6) combinations of one or more of such additional circuits.

### Producing Indole Tryptophan Metabolites and Tryptamine

[0521] In some embodiments, the genetically engineered bacteria comprise genetic circuits for the production of indole metabolites and/or tryptamine. Exemplary circuits for the production of indole metabolites/derivatives (e.g., FIG. 34, FIG. 35) are shown in FIG. 37A through FIG. 37H, FIG. 38A through FIG. 38F, and FIG. 39A though FIG. 39C, FIG. 43, and FIG. 44.

[0522] In some embodiments, the genetically engineered bacteria comprise genetic circuitry for converting tryptophan to tryptamine. In some embodiments, the engineered bacteria comprise gene sequence encoding Tryptophan decarboxylase, e.g., from Catharanthus roseus. In some embodiments, the engineered bacteria comprise genetic circuitry for producing indole-3-acetaldehyde and FICZ from tryptophan. In some embodiments, the genetically engineered bacteria comprise gene sequence encoding one or more of the following: aro9 (L-tryptophan aminotransferase, e.g., from S. cerevisae), aspC (aspartate aminotransferase, e.g., from E. coli , taal (L-tryptophan-pyruvate aminotransferase, e.g., from Arabidopsis thaliana), staO (L-tryptophan oxidase, e.g., from streptomyces sp. TP-A0274), trpDH (Tryptophan dehydrogenase, e.g., from Nostoc punctiforme NIES-2108) and ipdC (Indole-3-pyruvate decarboxylase, e.g., from Enterobacter cloacae). In some embodiments, the genetically engineered bacteria comprise gene sequence encoding one or more of the following: tdc (Tryptophan decarboxylase, e.g., from Catharanthus roseus and/or Clostridium sporogenes), and tynA (Monoamine oxidase, e.g., from E. coli ). In some embodiments, the engineered bacteria comprise genetic circuitry for producing indole-3-acetonitrile from tryptophan. In some embodiments, the genetically engineered bacteria comprise gene sequence encoding one or more of the following: cyp79B2, (tryptophan N-monooxygenase, e.g., from Arabidopsis thaliana), cyp79B3 (tryptophan N- monooxygenase, e.g., from Arabidopsis thaliana). In some embodiments, the engineered bacteria comprise genetic circuitry for producing kynurenine from tryptophan. In some embodiments, the genetically engineered bacteria comprise gene sequence encoding one or more of the following: IDO1(indoleamine 2,3-dioxygenase, e.g., from homo sapiens or TDO2 (tryptophan 2,3-dioxygenase, e.g., from homo sapiens), BNA2 (indoleamine 2,3-dioxygenase, e.g., from S. cerevisiae) and Afmid: Kynurenine formamidase, e.g., from mouse), BNA3 (kynurenine--oxoglutarate transaminase, e.g., from S. cerevisae). In some embodiments, the engineered bacteria comprise genetic circuitry for producing kynureninic acid from tryptophan. In some embodiments, the genetically engineered bacteria comprise gene sequence encoding one or more of the following: IDO1(indoleamine 2,3-dioxygenase, e.g., from homo sapiens or TDO2 (tryptophan 2,3-dioxygenase, e.g., from homo sapiens), BNA2 (indoleamine 2,3-dioxygenase, e.g., from S. cerevisiae) and Afmid: Kynurenine formamidase, e.g., from mouse), BNA3 (kynurenine--oxoglutarate transaminase, e.g., from S. cerevisae) and GOT2 (Aspartate aminotransferase, mitochondrial, e.g.,from homo sapiens or AADAT (Kynurenine/alpha-aminoadipate aminotransferase, mitochondrial, e.g., from homo sapiens), or CCLB1 (Kynurenine--oxoglutarate transaminase 1, e.g., from homo sapiens) or CCLB2 (kynurenine--oxoglutarate transaminase 3, e.g., from homo sapiens. In some embodiments, the engineered bacteria comprise genetic circuitry for producing indole from tryptophan. In some embodiments, the genetically engineered bacteria comprise gene sequence encoding one or more of the following: tnaA (tryptophanase, e.g., from E. coli ). In some embodiments, the engineered bacteria comprise genetic circuitry for producing indole-3-carbinol, indole-3-aldehyde, 3,3′ diindolylmethane (DIM), indolo(3,2-b) carbazole (ICZ) from indole glucosinolate (taken up through the diet). The genetically engineered bacteria comprise a gene sequence encoding pne2 (myrosinase, e.g., from Arabidopsis thaliana). In some embodiments, the engineered bacteria comprise genetic circuitry for producing indole-3-acetic acid from tryptophan. In some embodiments, the genetically engineered bacteria comprise gene sequence encoding one or more of the following: aro9 (L-tryptophan aminotransferase, e.g., from S. cerevisae), aspC (aspartate aminotransferase, e.g., from E. coli , taal (L-tryptophan-pyruvate aminotransferase, e.g., from Arabidopsis thaliana), staO (L-tryptophan oxidase, e.g., from streptomyces sp. TP-A0274), trpDH (Tryptophan dehydrogenase, e.g., from Nostoc punctiforme NIES-2108), ipdC (Indole-3-pyruvate decarboxylase, e.g., from Enterobacter cloacae), iadl (Indole-3-acetaldehyde dehydrogenase, e.g., from Ustilago maydis), AAO1 (Indole-3-acetaldehyde oxidase, e.g., from Arabidopsis thaliana). In some embodiments, the genetically engineered bacteria comprise gene sequence encoding one or more of the following: tdc (Tryptophan decarboxylase, e.g.,from Catharanthus roseus and/or Clostridium sporogenes), tynA (Monoamine oxidase, e.g., from E. coli ), iad1 (Indole-3-acetaldehyde dehydrogenase, e.g., from Ustilago maydis), AAO1 (Indole-3-acetaldehyde oxidase, e.g., from Arabidopsis thaliana). In some embodiments, the genetically engineered bacteria comprise gene sequence encoding one or more of the following: aro9 (L-tryptophan aminotransferase, e.g., from S. cerevisae), aspC (aspartate aminotransferase, e.g., from E. coli , taal (L-tryptophan-pyruvate aminotransferase, e.g., from Arabidopsis thaliana), staO (L-tryptophan oxidase, e.g., from streptomyces sp. TP-A0274), trpDH (Tryptophan dehydrogenase, e.g., from Nostoc punctiforme NIES-2108) and yuc2 (indole-3-pyruvate monoxygenase, e.g., from Arabidopsis thaliana). In some embodiments, the genetically engineered bacteria comprise gene sequence encoding one or more of the following: IaaM (Tryptophan 2-monooxygenase e.g., from Pseudomonas savastanoi), iaaH (Indoleacetamide hydrolase, e.g., from Pseudomonas savastanoi). In some embodiments, the genetically engineered bacteria comprise gene sequence encoding one or more of the following: cyp79B2 (tryptophan N-monooxygenase, e.g., from Arabidopsis thaliana), cyp79B3 (tryptophan N-monooxygenase, e.g., from Arabidopsis thaliana, cyp71a13 (indoleacetaldoxime dehydratase, e.g., from Arabidopis thaliana), nit1 (Nitrilase, e.g., from Arabidopsis thaliana), iaaH (Indoleacetamide hydrolase, e.g., from Pseudomonas savastanoi). In some embodiments, the genetically engineered bacteria comprises trpDH (Tryptophan dehydrogenase, e.g., from Nostoc punctiforme NIES-2108), ipdC (Indole-3-pyruvate decarboxylase, e.g., from Enterobacter cloacae) which together produce indole-3-acetaldehyde and FICZ though an (indol-3y1)pyruvate intermediate, and iadl (Indole-3-acetaldehyde dehydrogenase, e.g., from Ustilago maydis), which converts indole-3-acetaldehyde into indole-3-acetate.

[0523] In some embodiments, the genetically engineered bacteria comprise genetic circuits for the production of tryptophan, tryptamine, indole acetic acid, and indole propionic acid. In some embodiments, the engineered bacteria produces tryptamine. Tryptophan is optionally produced from chorismate precursor, and the bacteria optionally comprises circuits as depicted and/or described in FIG. 36A and/or FIG. 36B and/or FIG. 36C and/or FIG. 36D. Additionally, the bacteria comprises tdc (tryptophan decarboxylase, e.g., from Catharanthus roseus and/or Clostridium sporogenes), which converts tryptophan into tryptamine.

[0524] In some embodiments, the engineered bacteria comprise genetic circuits for the production of indole-3-acetate. Tryptophan is optionally produced from chorismate precursor, and the strain optionally comprises circuits as depicted and/or described in FIG. 36A and/or FIG. 36B and/or FIG. 36C and/or FIG. 36D. Additionally, the strain comprises trpDH (Tryptophan dehydrogenase, e.g., from Nostoc punctiforme NIES-2108) and ipdC (Indole-3-pyruvate decarboxylase, e.g., from Enterobacter cloacae) which together produce indole-3-acetaldehyde and FICZ though an (indo1-3y1)pyruvate intermediate, and iad1 (Indole-3-acetaldehyde dehydrogenase, e.g., from Ustilago maydis), which converts indole-3-acetaldehyde into indole-3-acetate.

[0525] In some embodiments, the engineered bacteria comprise genetic circuits for the production of indole-3-propionate. Tryptophan is optionally produced from chorismate precursor, and the strain optionally comprises circuits as depicted and/or described in FIG. 36A and/or FIG. 36B and/or FIG. 36C and/or FIG. 36D. Additionally, the strain comprises a circuit as described in FIG. 44, comprising trpDH (Tryptophan dehydrogenase, e.g., from Nostoc punctiforme NIES-2108, which produces (indo1-3y1)pyruvate from tryptophan), fldA (indole-3-propionyl-CoA:indole-3-lactate CoA transferase, e.g., from Clostridium sporogenes, which converts converts indole-3-lactate and indol-3-propionyl-CoA to indole-3-propionic acid and indole-3-lactate-CoA), fldB and fldC (indole-3-lactate dehydratase e.g., from Clostridium sporogenes, which converts indole-3-lactate-CoA to indole-3-acrylyl-CoA) fldD and/or AcuI: (indole-3-acrylyl-CoA reductase, e.g., from Clostridium sporogenes and/or acrylyl-CoA reductase, e.g., from Rhodobacter sphaeroides, which convert indole-3-acrylyl-CoA to indole-3-propionyl-CoA). The circuits further comprise fldH 1 and/or fldH2 (indole-3-lactate dehydrogenase 1 and/or 2, e.g., from Clostridium sporogenes), which converts (indo1-3-yl)pyruvate into indole-3-lactate).

[0526] In some embodiments, the engineered bacteria comprises genetic circuitry for the production of indole-3-propionic acid (IPA). In some embodiments, the engineered bacteria comprises gene sequence encoding tryptophan ammonia lyase and an indole-3-acrylate reductase (e.g., Tryptophan ammonia lyase (WAL) (e.g., from Rubrivivax benzoatilyticus) and indole-3-acrylate reductase (e.g., from Clostridum botulinum). Tryptophan ammonia lyase converts tryptophan to indole-3-acrylic acid, and indole-3-acrylate reductase converts indole-3-acrylic acid into IPA. Without wishing to be bound by theory, no oxygen is needed for this reaction, allowing it to proceed under low or no oxygen conditions, e.g., as those found in the mammalian gut. In some embodiments, the genetically engineered bacteria further comprise one or more circuits for the production of tryptophan, e.g., as shown in FIG. 36 (A-D) and FIG. 40 and as described elsewhere herein. In some embodiments, AroG and/or TrpE are replaced with feedback resistant versions to improve tryptophan production in the genetically engineered bacteria. In some embodiments, trpR and/or the tnaA gene (encoding a tryptophanase converting tryptophan into indole) are deleted to further increase levels of tryptophan produced.

[0527] In some embodiments, the engineered bacteria comprise genetic circuitry for producing indole-3-propionic acid (IPA), indole acetic acid (IAA), and/or tryptamine synthesis(TrA) circuits. In some embodiments, the engineered bacteria comprise gene sequence encoding one or more of the following: TrpDH: tryptophan dehydrogenase, e.g., from from Nostoc punctiforme NIES-2108; FldH1/F1dH2: indole-3-lactate dehydrogenase, e.g., from Clostridium sporogenes; FldA: indole-3-propionyl-CoA:indole-3-lactate CoA transferase, e.g., from Clostridium sporogenes; FldBC: indole-3-lactate dehydratase, e.g., from Clostridium sporogenes; FldD: indole-3-acrylyl-CoA reductase, e.g., from Clostridium sporogenes; AcuI: acrylyl-CoA reductase, e.g., from Rhodobacter sphaeroides. 1pdC: Indole-3-pyruvate decarboxylase, e.g., from Enterobacter cloacae; lad1: Indole-3-acetaldehyde dehydrogenase, e.g., from Ustilago maydis; Tdc: Tryptophan decarboxylase, e.g., from Catharanthus roseus or from Clostridium sporogenes.

[0528] In some embodiments, the engineered bacteria comprise genetic circuitry for producing (indol-3-yl)pyruvate (IPyA). In some embodiments, the engineered bacteria comprise gene sequence encoing one or more of the following: tryptophan dehydrogenase (EC 1.4.1.19) (enzyme that catalyzes the reversible chemical reaction converting L-tryptophan, NAD(P) and water to (indol-3-yl)pyruvate (IPyA), NH₃, NAD(P)H and ft)); Indole-3-lactate dehydrogenase ((EC 1.1.1.110, e.g., Clostridium sporogenes or Lactobacillus casei) (converts (indol-3y1)pyruvate (IpyA) and NADH and H+ to indole-3-lactate (ILA) and NAD+); Indole-3-propionyl-CoA:indole-3-lactate CoA transferase (F1dA) (converts indole-3-lactate (ILA) and indol-3-propionyl-CoA to indole-3-propionic acid (IPA) and indole-3-lactate-CoA); Indole-3-acrylyl-CoA reductase (F1dD) and acrylyl-CoA reductase (Acul) (convert indole-3-acrylyl-CoA to indole-3-propionyl-CoA); Indole-3-lactate dehydratase (FldBC) (converts indole-3-lactate-CoA to indole-3-acrylyl-CoA); Indole-3-pyruvate decarboxylase (1pdC:) (converts Indole-3-pyruvic acid (IPyA) into Indole-3-acetaldehyde (IAA1d)); lad1: Indole-3-acetaldehyde dehydrogenase (coverts Indole-3-acetaldehyde (IAA1d) into Indole-3-acetic acid (IAA)); Tdc: Tryptophan decarboxylase (converts tryptophan (Trp) into tryptamine (TrA)). In some embodiments, the genetically engineered bacteria further comprise one or more circuits for the production of tryptophan, e.g., as shown in FIG. 36 (A-D) and FIG. 40 and as described elsewhere herein. In some embodiments, AroG and/or TrpE are replaced with feedback resistant versions to improve tryptophan production in the genetically engineered bacteria. In some embodiments, trpR and/or the tnaA gene (encoding a tryptophanase converting tryptophan into indole) are deleted to further increase levels of tryptophan produced.

[0529] In any of the described embodiments, any of the gene(s), gene sequence(s) and/or gene circuit(s) or cassette(s) are optionally expressed from an inducible promoter. In certain embodiments, the one or more cassettes are under the control of constitutive promoters. Exemplary inducible promoters which may control the expression of the gene(s), gene sequence(s) and/or gene circuit(s) or cassette(s) include oxygen level-dependent promoters (e.g., FNR-inducible promoter), promoters induced by inflammation or an inflammatory response (RNS, ROS promoters), and promoters induced by a metabolite that may or may not be naturally present (e.g., can be exogenously added) in the gut, e.g., arabinose and tetracycline. The bacteria may also include an auxotrophy, e.g., deletion of thyA (A thyA; thymidine dependence).

[0530] In some embodiments, the genetically engineered bacteria further comprise one or more circuits for the production of tryptophan, e.g., as shown in FIG. 36 (A-D) and FIG. 40 and as described elsewhere herein. In some embodiments, AroG and/or TrpE are replaced with feedback resistant versions to improve tryptophan production in the genetically engineered bacteria. In some embodiments, trpR and/or the tnaA gene (encoding a tryptophanase converting tryptophan into indole) are deleted to further increase levels of tryptophan produced.

[0531] In in any of these embodiments the expression of the gene sequences for the production of the indole and other tryptophan metabolites, including, but not limited to, tryptamine and/or indole-3 acetaladehyde, indole-3acetonitrile, indole, indole acetic acid FICZ, indole-3-propionic acid, is under the control of an inducible promoter. Exemplary inducible promoters which may control the expression of the biosynthetic cassettes include oxygen level-dependent promoters (e.g., FNR-inducible promoter), promoters induced by inflammation or an inflammatory response (RNS, ROS promoters), and promoters induced by a metabolite characteristic of a disorder, such as liver damage or a metabolic disease, or that may or may not be naturally present (e.g., can be exogenously added) in the gut, e.g., arabinose and tetracycline. In some embodiments, the gene sequences(s) are controlled by an inducible promoter. In some embodiments, the gene sequences(s) are controlled by a constitutive promoter. In some embodiments, the gene sequences(s) are controlled by an inducible and/or constritutive promoter, and are expressed during bacterial culture in vitro, e.g., for bacterial expansion, production and/or manufacture, as described herein.

[0532] In some embodiments, the genetically engineered bacteria are capable of expressing any one or more of the described circuits in low-oxygen conditions, in the presence of disease or tissue specific molecules or metabolites, in the presence of molecules or metabolites associated with inflammation or an inflammatory response or immune suppression, liver damage, or metabolic disease, or in the presence of some other metabolite that may or may not be present in the gut, such as arabinose. In some embodiments, any one or more of the described circuits are present on one or more plasmids (e.g., high copy or low copy) or are integrated into one or more sites in the bacterial chromosome. Also, in some embodiments, the genetically engineered bacteria are further capable of expressing any one or more of the described circuits and further comprise one or more of the following: (1) one or more auxotrophies, such as any auxotrophies known in the art and provided herein, e.g., thyA auxotrophy, (2) one or more kill switch circuits, such as any of the kill-switches described herein or otherwise known in the art, (3) one or more antibiotic resistance circuits, (4) one or more transporters for importing biological molecules or substrates, such any of the transporters described herein or otherwise known in the art, (5) one or more secretion circuits, such as any of the secretion circuits described herein and otherwise known in the art, and (6) combinations of one or more of such additional circuits. Tryptamine

[0533] In some embodiments, the genetically engineered bacteria comprise one or more gene sequence(s) which encode one or more tryptophan catabolism enzymes, which produce tryptamine from tryptophan. The monoamine alkaloid, tryptamine, is derived from the direct decarboxylation of tryptophan. Tryptophan is converted to indole-3-acetic acid (IAA) via the enzymes tryptophan monooxygenase (IaaM) and indole-3- acetamide hydrolase (IaaH), which constitute the indole-3-acetamide (IAM) pathway, see eg., FIG. 34, FIG. 35A and FIG. 35B.

[0534] A non-limiting example of such as strain is shown in FIG. 37A. Another non-limiting example of such as strain is shown in FIG. 39A. In one embodiment, the genetically engineered bacteria comprise one or more gene sequence(s) which encode one or more Tryptophan decarboxylase(s), e.g., from Catharanthus roseus. In one embodiment, the genetically engineered bacteria comprise one or more gene sequence(s) which encode one or more Tryptophan decarboxylase(s), e.g., from Clostridium sporgenenes. In one embodiment, the genetically engineered bacteria comprise one or more gene sequence(s) which encode one or more Tryptophan decarboxylase(s) e.g., from Ruminococcus Gnavus.

[0535] Table 15, Table 16, and Table 17 lists exemplary sequences for tryptamine production in genetically engineered bacteria.

[0536] In some embodiments, the genetically engineered bacteria which produce tryptamine from tryptophan also optionally comprise one or more gene sequence(s) comprising one or more enzymes for tryptophan production, and gene deletions/or mutations as depicted and described in FIG. 36, FIG. 40A and/or FIG. 40B and described elsewhere herein. In some embodiments, AroG and/or TrpE are replaced with feedback resistant versions to improve tryptophan production in the genetically engineered bacteria. In some embodiments, trpR and/or the tnaA gene (encoding a tryptophanase converting tryptophan into indole) are deleted to further increase levels of tryptophan produced. In some embodiments, the genetically engineered bacteria which produce tryptamine from tryptophan also optionally comprise one or more gene sequence(s) which encode one or more transporter(s) as described herein, through which tryptophan can be imported. Optionally, In some embodiments, the genetically engineered bacteria which produce tryptamine from tryptophan also optionally comprise one or more gene sequence(s) which encode an exporter as described herein, which can export tryptophan or any of its metabolites.

[0537] In some embodiments, the genetically engineered bacteria are capable of producing Tryptamine under inducing conditions, e.g., under a condition(s) associated with inflammation. In some embodiments, the genetically engineered bacteria are capable of producing kynurenine in low-oxygen conditions, in the presence of certain molecules or metabolites, in the presence of molecules or metabolites associated with liver damage, metabolic disease, inflammation or an inflammatory response, or in the presence of some other metabolite that may or may not be present in the gut, such as arabinose.

Indole-3-acetaldehyde and FICZ

[0538] In one embodiment, the genetically engineered bacteria comprise one or more gene sequence(s) which encode one or more tryptophan catabolism enzymes, which produce indole-3-acetaldehyde and FICZ from tryptophan. Exemplary gene cassettes for the production of produce indole-3-acetaldehyde and FICZ from tryptophan are shown in FIG. 37B.

[0539] In one embodiment, the genetically engineered bacteria comprise one or more gene sequence(s) which encode aro9 (L-tryptophan aminotransferase). In one embodiment, the (L-tryptophan aminotransferase is from S. cerevisiae. In one embodiment, the genetically engineered bacteria comprise one or more gene sequence(s) which encode ipdC (Indole-3-pyruvate decarboxylase, e.g., from Enterobacter cloacae). In one embodiment, the genetically engineered bacteria comprise one or more gene sequence(s) which encode aro9 and ipdC. In one embodiment, the genetically engineered bacteria comprise one or more gene sequence(s) which encode aspC (aspartate aminotransferase. In one embodiment, the genetically engineered bacteria comprise one or more gene sequence(s) which encode aspC from E. coli . In one embodiment, the genetically engineered bacteria comprise one or more gene sequence(s) which encode aspC and ipdC. In one embodiment, the genetically engineered bacteria comprise one or more gene sequence(s) which encode taal (L-tryptophan-pyruvate aminotransferase, In one embodiment, the genetically engineered bacteria comprise one or more gene sequence(s) which encode taal from Arabidopsis thaliana. In one embodiment, the genetically engineered bacteria comprise one or more gene sequence(s) which encode taal and ipdC. In one embodiment, the genetically engineered bacteria comprise one or more gene sequence(s) which encode staO (L-tryptophan oxidase). In one embodiment, the genetically engineered bacteria comprise one or more gene sequence(s) which encode staO from streptomyces sp. TP-A0274. In one embodiment, the genetically engineered bacteria comprise one or more gene sequence(s) which encode staO and ipdC. In one embodiment, the genetically engineered bacteria comprise one or more gene sequence(s) which encode trpDH (Tryptophan dehydrogenase). In one embodiment, the genetically engineered bacteria comprise one or more gene sequence(s) which encode trpDH from Nostoc punctiforme NIES-2108. In one embodiment, the genetically engineered bacteria comprise one or more gene sequence(s) which encode trpDH and ipdC. In one embodiment, the genetically engineered bacteria comprise one or more gene sequence(s) which encode one or more of aro9 or aspC or taal or staO or trpDH. In one embodiment, the genetically engineered bacteria comprise one or more gene sequence(s) which encode one or more of aro9 or aspC or taal or staO or trpDH and ipdC.

[0540] Further exemplary gene cassettes for the production of produce indole-3-acetaldehyde and FICZ from tryptophan are shown in FIG. 37C. In one embodiment, the genetically engineered bacteria comprise one or more gene sequence(s) which encode tdc (Tryptophan decarboxylase). In one embodiment, the genetically engineered bacteria comprise one or more gene sequence(s) which encode tdc from Catharanthus roseus. In one embodiment, the genetically engineered bacteria comprise one or more gene sequence(s) which encode tynA (Monoamine oxidase). In one embodiment, the genetically engineered bacteria comprise one or more gene sequence(s) which encode tynA from E. coli . In one embodiment, the genetically engineered bacteria comprise one or more gene sequence(s) which encode tdc and tynA.

[0541] In any of these embodiments, the genetically engineered bacteria which produce produce indole-3-acetaldehyde and FICZ also optionally comprise one or more gene sequence(s) comprising one or more enzymes for tryptophan production, and gene deletions/or mutations as depicted and described in FIG. 36, FIG. 40A and/or FIG. 40B and described elsewhere herein. In some embodiments, AroG and/or TrpE are replaced with feedback resistant versions to improve tryptophan production in the genetically engineered bacteria. In some embodiments, trpR and/or the tnaA gene (encoding a tryptophanase converting tryptophan into indole) are deleted to further increase levels of tryptophan produced. In some embodiments, the genetically engineered bacteria which produce indole-3-acetaldehyde and FICZ also optionally comprise one or more gene sequence(s) which encode one or more transporter(s) as described herein, through which tryptophan can be imported. Optionally, in some embodiments, the genetically engineered bacteria which produce indole-3-acetaldehyde and FICZ also optionally comprise one or more gene sequence(s) which encode an exporter as described herein, which can export tryptophan or any of its metabolites.

[0542] In some embodiments, the genetically engineered bacteria are capable of producing Indole-3-aldehyde under inducing conditions, e.g., under a condition(s) associated with inflammation. In some embodiments, the genetically engineered bacteria are capable of producing kynurenine in low-oxygen conditions, in the presence of certain molecules or metabolites, in the presence of molecules or metabolites associated with inflammation or an inflammatory response, or in the presence of some other metabolite that may or may not be present in the gut, such as arabinose.

[0543] In some embodiments, the gene sequences(s) are controlled by an inducible promoter. In some embodiments, the gene sequences(s) are controlled by a constitutive promoter. In some embodiments, the gene sequences(s) are controlled by an inducible and/or constritutive promoter, and are expressed during bacterial culture in vitro, e.g., for bacterial expansion, production and/or manufacture, as described herein. Indole-3-acetic acid

[0544] In some embodiments, the genetically engineered bacteria comprise one or more gene cassettes which convert tryptophan to Indole-3-aldehyde and Indole Acetic Acid, e.g., via a tryptophan aminotransferase cassette. A non-limiting example of such a tryptophan aminotransferase expressed by the genetically engineered bacteria is in Table 14. In some embodiments, the genetically engineered bacteria take up tryptophan through an endogenous or exogenous transporter, and further produce Indole-3-aldehyde and Indole Acetic Acid from tryptophan. In some embodiments, the genetically engineered bacteria optionally comprise a tryptophan and/or indole metabolite exporter.

[0545] The genetically engineered bacteria may comprise any suitable gene for producing Indole-3-aldehyde and/or Indole Acetic Acid and/or Tryptamine. In some embodiments, the gene for producing kynurenine is modified and/or mutated, e.g., to enhance stability, increase Indole-3-aldehyde and/or Indole Acetic Acid and/or Tryptamine production, and/or increase anti-inflammatory potency under inducing conditions. In some embodiments, the engineered bacteria also have enhanced uptake or import of tryptophan, e.g., comprise a transporter or other mechanism for increasing the uptake of tryptophan into the bacterial cell, as discussed in detail above. In some embodiments, the engineered bacteria also have enhanced export of a indole tryptophan metabolite , e.g., comprise an exporter or other mechanism for increasing the uptake of tryptophan into the bacterial cell, as discussed in detail above. In some embodiments, the genetically engineered bacteria are capable of producing Indole-3-aldehyde and/or Indole Acetic Acid and/or Tryptamine under inducing conditions, e.g., under a condition(s) associated with inflammation. In some embodiments, the genetically engineered bacteria are capable of producing kynurenine in low-oxygen conditions, in the presence of certain molecules or metabolites, in the presence of molecules or metabolites associated with inflammation or an inflammatory response, or in the presence of some other metabolite that may or may not be present in the gut, such as arabinose.

[0546] In one embodiment, the genetically engineered bacteria comprise one or more gene sequence(s) which encode one or more tryptophan catabolism enzymes, which produce indole-3-acetic acid.

[0547] Non-limiting example of such gene sequence(s) are shown in FIG. 38A, FIG. 38B, FIG. 38C, FIG. 38D, and FIG. 38E, and FIG. 39B and FIG. 39E.

[0548] In one embodiment, the genetically engineered bacteria comprise one or more gene sequence(s) which encode aro9 (L-tryptophan aminotransferase). In one embodiment, the genetically engineered bacteria comprise one or more gene sequence(s) which encode aro9 from S. cerevisae). In one embodiment, the genetically engineered bacteria comprise one or more gene sequence(s) which encode aspC (aspartate aminotransferase), In one embodiment, the genetically engineered bacteria comprise one or more gene sequence(s) which encode aspC from E. coli . In one embodiment, the genetically engineered bacteria comprise one or more gene sequence(s) which encode taal (L-tryptophan-pyruvate aminotransferase. In one embodiment, the genetically engineered bacteria comprise one or more gene sequence(s) which encode taal from Arabidopsis thaliana). In one embodiment, the genetically engineered bacteria comprise one or more gene sequence(s) which encode staO (L-tryptophan oxidase). In one embodiment, the genetically engineered bacteria comprise one or more gene sequence(s) which encode staO from streptomyces sp. TP-A0274). In one embodiment, the genetically engineered bacteria comprise one or more gene sequence(s) which encode trpDH (Tryptophan dehydrogenase). In one embodiment, the genetically engineered bacteria comprise one or more gene sequence(s) which encode trpDH from Nostoc punctiforme NIES-2108). In one embodiment, the genetically engineered bacteria comprise one or more gene sequence(s) which encode iadl (Indole-3-acetaldehyde dehydrogenase). In one embodiment, the genetically engineered bacteria comprise one or more gene sequence(s) which encode iadl from Ustilago maydis. In one embodiment, the genetically engineered bacteria comprise one or more gene sequence(s) which encode AAO1 (Indole-3-acetaldehyde oxidase). In one embodiment, the genetically engineered bacteria comprise one or more gene sequence(s) which encode AAO1 from Arabidopsis thaliana. In one embodiment, the genetically engineered bacteria comprise one or more gene sequence(s) which encode ipdC (Indole-3-pyruvate decarboxylase, e.g., from Enterobacter cloacae). In one embodiment, the genetically engineered bacteria comprise one or more gene sequence(s) which encode ipdC (Indole-3-pyruvate decarboxylase, e.g., from Enterobacter cloacae) in combination with one or more sequences encoding enzymes selected from aro9 and/or aspC and/or taal and/or staO and/or trpDH. In one embodiment, the genetically engineered bacteria comprise one or more gene sequence(s) which encode ipdC (Indole-3-pyruvate decarboxylase, e.g., from Enterobacter cloacae) in combination with one or more sequences encoding enzymes selected from iad1 and/or aao1. In one embodiment, the genetically engineered bacteria comprise one or more gene sequence(s) which encode ipdC (Indole-3-pyruvate decarboxylase, e.g., from Enterobacter cloacae) in combination with one or more sequences encoding enzymes selected from aro9 and/or aspC and/or taa1 and/or staO and in combination with one or more sequences encoding enzymes selected from iad1 and/or aao1 (see, e.g., FIG. 38A).

[0549] Another non-limiting example of gene sequence(s) for the production of indole-3-acetic acid are shown in FIG. 38B. In one embodiment, the genetically engineered bacteria comprise one or more gene sequence(s) which encode tdc (Tryptophan decarboxylase). In one embodiment, the genetically engineered bacteria comprise one or more gene sequence(s) which encode tdc from Catharanthus roseus). In one embodiment, the genetically engineered bacteria comprise one or more gene sequence(s) which encode tynA (Monoamine oxidase). In one embodiment, the genetically engineered bacteria comprise one or more gene sequence(s) which encode tynA from E. coli ). In one embodiment, the genetically engineered bacteria comprise one or more gene sequence(s) which encode iadl (Indole-3-acetaldehyde dehydrogenase). In one embodiment, the genetically engineered bacteria comprise one or more gene sequence(s) which encode iadl from Ustilago maydis). In one embodiment, the genetically engineered bacteria comprise one or more gene sequence(s) which encode AAO1 (Indole-3-acetaldehyde oxidase). In one embodiment, the genetically engineered bacteria comprise one or more gene sequence(s) which encode AAO1 from Arabidopsis thaliana). In one embodiment, the genetically engineered bacteria comprise one or more gene sequence(s) which encode tdc and tynA. In one embodiment, the genetically engineered bacteria comprise one or more gene sequence(s) which encode tdc and one or more sequence(s) selected from iadl and/or aao 1. In one embodiment, the genetically engineered bacteria comprise one or more gene sequence(s) which encode tynA and one or more sequence(s) selected from iadl and/or aao 1. In one embodiment, the genetically engineered bacteria comprise one or more gene sequence(s) which encode tdc and tynA and one or more sequence(s) selected from iad1 and/or aao1.

[0550] Another non-limiting example of gene sequence(s) for the production of indole-3-acetic acid are shown in FIG. 38C. In one embodiment, the genetically engineered bacteria comprise one or more gene sequence(s) which encode yuc2 (indole-3-pyruvate monooxygenase). In one embodiment, the genetically engineered bacteria comprise one or more gene sequence(s) which encode yuc2 from Enterobacter cloacae. In one embodiment, the genetically engineered bacteria comprise one or more gene sequence(s) which encode aro9 (L-tryptophan aminotransferase). In one embodiment, the (L-tryptophan aminotransferase is from S. cerevisiae. In one embodiment, the genetically engineered bacteria comprise one or more gene sequence(s) which encode aro9 and yuc2. In one embodiment, the genetically engineered bacteria comprise one or more gene sequence(s) which encode aspC (aspartate aminotransferase. In one embodiment, the genetically engineered bacteria comprise one or more gene sequence(s) which encode aspC from E. coli . In one embodiment, the genetically engineered bacteria comprise one or more gene sequence(s) which encode aspC and yuc2. In one embodiment, the genetically engineered bacteria comprise one or more gene sequence(s) which encode taal (L-tryptophan-pyruvate aminotransferase. In one embodiment, the genetically engineered bacteria comprise one or more gene sequence(s) which encode taal from Arabidopsis thaliana. In one embodiment, the genetically engineered bacteria comprise one or more gene sequence(s) which encode taal and yuc2.In one embodiment, the genetically engineered bacteria comprise one or more gene sequence(s) which encode staO (L-tryptophan oxidase). In one embodiment, the genetically engineered bacteria comprise one or more gene sequence(s) which encode staO from streptomyces sp. TP-A0274. In one embodiment, the genetically engineered bacteria comprise one or more gene sequence(s) which encode staO and yuc2. In one embodiment, the genetically engineered bacteria comprise one or more gene sequence(s) which encode trpDH (Tryptophan dehydrogenase). In one embodiment, the genetically engineered bacteria comprise one or more gene sequence(s) which encode trpDH from Nostoc punctiforme NIES-2108. In one embodiment, the genetically engineered bacteria comprise one or more gene sequence(s) which encode trpDH and yuc2. In one embodiment, the genetically engineered bacteria comprise one or more gene sequence(s) which encode one or more of aro9 or aspC or taal or staO or trpDH. In one embodiment, the genetically engineered bacteria comprise one or more gene sequence(s) which encode one or more of aro9 or aspC or taal or staO or trpDH and yuc2.

[0551] Another non-limiting example of gene sequence(s) for the production of acetic acid are shown in FIG. 38D. In one embodiment, the genetically engineered bacteria comprise one or more gene sequence(s) which encode IaaM (Tryptophan 2-monooxygenase). In one embodiment, the genetically engineered bacteria comprise one or more gene sequence(s) which encode IaaM from Pseudomonas savastanoi). In one embodiment, the genetically engineered bacteria comprise one or more gene sequence(s) which encode iaaH (Indoleacetamide hydrolase). In one embodiment, the genetically engineered bacteria comprise one or more gene sequence(s) which encode iaaH from Pseudomonas savastanoi). In one embodiment, the genetically engineered bacteria comprise one or more gene sequence(s) which encode IaaM and iaaH.

[0552] Another non-limiting example of gene sequence(s) for the production of acetic acid are shown in FIG. 38E. In one embodiment, the genetically engineered bacteria comprise one or more gene sequence(s) which encode cyp71a13 (indoleacetaldoxime dehydratase). In one embodiment, the genetically engineered bacteria comprise one or more gene sequence(s) which encode cyp71a13 from Arabidopis thaliana. In one embodiment, the genetically engineered bacteria comprise one or more gene sequence(s) which encode nit1 (Nitrilase). In one embodiment, the genetically engineered bacteria comprise one or more gene sequence(s) which encode nit1 from Arabidopsis thaliana. In one embodiment, the genetically engineered bacteria comprise one or more gene sequence(s) which encode iaaH (Indoleacetamide hydrolase). In one embodiment, the genetically engineered bacteria comprise one or more gene sequence(s) which encode iaaH from Pseudomonas savastanoi). In one embodiment, the genetically engineered bacteria comprise one or more gene sequence(s) which encode cyp79B2 (tryptophan N-monooxygenase). In one embodiment, the genetically engineered bacteria comprise one or more gene sequence(s) which encode cyp79B2 from Arabidopsis thaliana. In one embodiment, the genetically engineered bacteria comprise one or more gene sequence(s) which encode cyp79B2 and cyp71a13. In one embodiment, the genetically engineered bacteria comprise one or more gene sequence(s) which encode cyp79B2 from Arabidopsis thaliana. In one embodiment, the genetically engineered bacteria comprise one or more gene sequence(s) which encode cyp79B2 and nitl and/or iaaH. In one embodiment, the genetically engineered bacteria comprise one or more gene sequence(s) which encode cyp79B3 (tryptophan N-monooxygenase). In one embodiment, the genetically engineered bacteria comprise one or more gene sequence(s) which encode cyp79B3 from Arabidopsis thaliana. In one embodiment, the genetically engineered bacteria comprise one or more gene sequence(s) which encode cyp79B3 and cyp71a13. In one embodiment, the genetically engineered bacteria comprise one or more gene sequence(s) which encode cyp79B3 and cyp71a13 and nitl and/or iaaH. In one embodiment, the genetically engineered bacteria comprise one or more gene sequence(s) which encode cyp79B3, cyp79B2 and cyp71a13. In one embodiment, the genetically engineered bacteria comprise one or more gene sequence(s) which encode cyp79B3, cyp79B2 and cyp71a13, and nitl and/or iaaH. In one embodiment, the genetically engineered bacteria comprise one or more gene sequence(s) which encode cyp79B3 from Arabidopsis thaliana. In one embodiment, the genetically engineered bacteria comprise one or more gene sequence(s) which encode cyp79B3 and cyp71a13 and nit1 and iaaH. In one embodiment, the genetically engineered bacteria comprise one or more gene sequence(s) which encode cyp79B3, cyp79B2 and cyp71a13 and nit1 and iaaH.

[0553] Another non-limiting example of gene sequence(s) for the production of indole-3-acetic acid are shown in FIG. 38F. Another non-limiting example of gene sequence(s) for the production of indole-3-acetic acid are shown in FIG. 39E. In one embodiment, the genetically engineered bacteria comprise one or more gene sequence(s) which encode trpDH (Tryptophan dehydrogenase). In one embodiment, the genetically engineered bacteria comprise one or more gene sequence(s) which encode trpDH from Nostoc punctiforme NIES-2108. In one embodiment, the genetically engineered bacteria comprise one or more gene sequence(s) which encode ipdC (Indole-3-pyruvate decarboxylase, e.g., from Enterobacter cloacae). In one embodiment, the genetically engineered bacteria comprise one or more gene sequence(s) which encode iadl (Indole-3-acetaldehyde dehydrogenase). In one embodiment, the genetically engineered bacteria comprise one or more gene sequence(s) which encode iad1 from Ustilago maydis. In one embodiment, the genetically engineered bacteria comprise one or more gene sequence(s) which encode one or more of trpDH and/or ipdC and/or iad1. In one embodiment, the genetically engineered bacteria comprise one or more gene sequence(s) which encode one or more of trpDH and ipdC and iad1.

[0554] In any of these embodiments, the genetically engineered bacteria which produce indole acetic acid also optionally comprise one or more gene sequence(s) comprising one or more enzymes for tryptophan production, and gene deletions/or mutations as depicted and described in FIG. 36, FIG. 40A and/or FIG. 40B and described elsewhere herein. In some embodiments, AroG and/or TrpE are replaced with feedback resistant versions to improve tryptophan production in the genetically engineered bacteria. In some embodiments, trpR and/or the tnaA gene (encoding a tryptophanase converting tryptophan into indole) are deleted to further increase levels of tryptophan produced. In some embodiments, the genetically engineered bacteria which produce indole acetic acid also optionally comprise one or more gene sequence(s) which encode one or more transporter(s) as described herein, through which tryptophan can be imported. Optionally, in some embodiments, the genetically engineered bacteria which produce indole acetic acid also optionally comprise one or more gene sequence(s) which encode an exporter as described herein, which can export tryptophan or any of its metabolites.

[0555] In some embodiments, the genetically engineered bacteria are capable of producing Indole Acetic Acid and under inducing conditions, e.g., under a condition(s) associated with inflammation. In some embodiments, the genetically engineered bacteria are capable of producing kynurenine in low-oxygen conditions, in the presence of certain molecules or metabolites, in the presence of molecules or metabolites associated with liver damage, metabolic disease, inflammation or an inflammatory response, or in the presence of some other metabolite that may or may not be present in the gut, such as arabinose.

[0556] In some embodiments, the gene sequences(s) are controlled by an inducible promoter. In some embodiments, the gene sequences(s) are controlled by a constitutive promoter. In some embodiments, the gene sequences(s) are controlled by an inducible and/or constritutive promoter, and are expressed during bacterial culture in vitro, e.g., for bacterial expansion, production and/or manufacture, as described herein. Indole-3-acetonitrile

[0557] In one embodiment, the genetically engineered bacteria comprise one or more gene sequence(s) which encode one or more tryptophan catabolism enzymes, which produce indole-3-acetonitrile from tryptophan. A non-limiting example of such gene sequence(s) which allow in which the genetically engineered bacteria to produce indole-3-acetonitrile from tryptophan is depicted in FIG. 16D.

[0558] In one embodiment, the genetically engineered bacteria comprise one or more gene sequence(s) which encode cyp79B2 (tryptophan N-monooxygenase). In one embodiment, the genetically engineered bacteria comprise one or more gene sequence(s) which encode cyp79B2 from Arabidopsis thaliana. In one embodiment, the genetically engineered bacteria comprise one or more gene sequence(s) which encode cyp71a13 (indoleacetaldoxime dehydratase). In one embodiment, the genetically engineered bacteria comprise one or more gene sequence(s) which encode cyp71a13 from Arabidopis thaliana. In one embodiment, the genetically engineered bacteria comprise one or more gene sequence(s) which encode cyp79B2 and cyp71a13.

[0559] In one embodiment, the genetically engineered bacteria comprise one or more gene sequence(s) which encode cyp79B3 (tryptophan N-monooxygenase) In one embodiment, the genetically engineered bacteria comprise one or more gene sequence(s) which encode cyp79B3 from Arabidopsis thaliana. In one embodiment, the genetically engineered bacteria comprise one or more gene sequence(s) which encode cyp79B3 and cyp71a13. In one embodiment, the genetically engineered bacteria comprise one or more gene sequence(s) which encode cyp79B3, cyp79B2 and cyp71a13.

[0560] In any of these embodiments, the genetically engineered bacteria which produce indole-3-acetonitrile from tryptophan also optionally comprise one or more gene sequence(s) comprising one or more enzymes for tryptophan production, and gene deletions/or mutations as depicted and described in FIG. 36, FIG. 40A and/or FIG. 40B and described elsewhere herein. In some embodiments, AroG and/or TrpE are replaced with feedback resistant versions to improve tryptophan production in the genetically engineered bacteria. In some embodiments, trpR and/or the tnaA gene (encoding a tryptophanase converting tryptophan into indole) are deleted to further increase levels of tryptophan produced.

[0561] In some embodiments, the genetically engineered bacteria which produce indole-3-acetonitrile from tryptophan also optionally comprise one or more gene sequence(s) which encode one or more transporter(s) as described herein, through which tryptophan can be imported. Optionally, in some embodiments, the genetically engineered bacteria which produce indole-3-acetonitrile from tryptophan also optionally comprise one or more gene sequence(s) which encode an exporter as described herein, which can export tryptophan or any of its metabolites.

[0562] In some embodiments, the gene sequences(s) are controlled by an inducible promoter. In some embodiments, the gene sequences(s) are controlled by a constitutive promoter. In some embodiments, the gene sequences(s) are controlled by an inducible and/or constritutive promoter, and are expressed during bacterial culture in vitro, e.g., for bacterial expansion, production and/or manufacture, as described herein.

### Indole-3-Propionic Acid (IPA)

[0563] In one embodiment, the genetically engineered bacteria comprise one or more gene sequence(s) which encode one or more tryptophan catabolism enzymes, which produce indole-3-propionic acid from tryptophan. FIG. 43 and FIG. 44, and FIG. 39C depict schematics of exemplary circuits for the production of indole-3-propionic acid.

[0564] In some embodiments, the genetically engineered bacteria comprise one or more gene sequences encoding tryptophan ammonia lyase. In some embodiments, the genetically engineered bacteria comprise one or more gene sequences encoding tryptophan ammonia lyase from Rubrivivax benzoatilyticus. In some embodiments, the genetically engineered bacteria comprise one or more gene sequences encoding indole-3-acrylate reductase. In some embodiments, the genetically engineered bacteria comprise one or more gene sequences encoding indole-3-acrylate reductase from Clostridum botulinum. In some embodiments, the genetically engineered bacteria comprise one or more gene sequences encoding a tryptophan ammonia lyase and an indole-3-acrylate reductase. In some embodiments, the indole-3-propionate-producing strain optionally produces tryptophan from a chorismate precursor, and the strain optionally comprises additional circuits for tryptophan production and/or tryptophan uptake/transport s described herein.

[0565] The genetically engineered bacteria comprise a circuit, comprising trpDH (Tryptophan dehydrogenase, e.g., from Nostoc punctiforme NIES-2108, which produces (indo1-3yl)pyruvate from tryptophan), fldA (indole-3-propionyl-CoA:indole-3-lactate CoA transferase, e.g., from Clostridium sporogenes, which converts converts indole-3-lactate and indol-3-propionyl-CoA to indole-3-propionic acid and indole-3-lactate-CoA), fldB and fldC (indole-3-lactate dehydratase e.g., from Clostridium sporogenes, which converts indole-3-lactate-CoA to indole-3-acrylyl-CoA) fldD and/or Acul: (indole-3-acrylyl-CoA reductase, e.g., from Clostridium sporogenes and/or acrylyl-CoA reductase, e.g., from Rhodobacter sphaeroides, which convert indole-3-acrylyl-CoA to indole-3-propionyl-CoA). The circuits further comprise fldH1 and/or fldH2 (indole-3-lactate dehydrogenase 1 and/or 2, e.g., from Clostridium sporogenes), which converts (indol-3-yl)pyruvate into indole-3-lactate) (see, e.g., FIG. 44).

[0566] Another embodiment of the IPA producing strain is shown in FIG. 43.

[0567] In some embodiments, the genetically engineered bacteria comprise one or more gene sequences encoding trpDH (Tryptophan dehydrogenase). In some embodiments, the genetically engineered bacteria comprise one or more gene sequences encoding trpDH from Nostoc punctiforme NIES-2108. In some embodiments, the genetically engineered bacteria comprise one or more gene sequences encoding fldA (indole-3-propionyl-CoA:indole-3-lactate CoA transferase). In some embodiments, the genetically engineered bacteria comprise one or more gene sequences encoding fldA from Clostridium sporogenes. In some embodiments, the genetically engineered bacteria comprise one or more gene sequences encoding fldB and fldC (indole-3-lactate dehydratase). In some embodiments, the genetically engineered bacteria comprise one or more gene sequences encoding fldB and fldC Clostridium sporogenes. In some embodiments, the genetically engineered bacteria comprise one or more gene sequences encoding fldD (indole-3-acrylyl-CoA reductase). In some embodiments, the genetically engineered bacteria comprise one or more gene sequences encoding fldD from Clostridium sporogenes. In some embodiments, the genetically engineered bacteria comprise one or more gene sequences encoding AcuI (acrylyl-CoA reductase). In some embodiments, the genetically engineered bacteria comprise one or more gene sequences encoding Acul from Rhodobacter sphaeroides. In some embodiments, the genetically engineered bacteria comprise one or more gene sequences encoding fldH1 (3-lactate dehydrogenase 1). In some embodiments, the genetically engineered bacteria comprise one or more gene sequences encoding fldH1 from Clostridium sporogenes. In some embodiments, the genetically engineered bacteria comprise one or more gene sequences encoding fldH2 (indole-3-lactate dehydrogenase 2). In some embodiments, the genetically engineered bacteria comprise one or more gene sequences encoding fldH2 from Clostridium sporogenes). In some embodiments, the genetically engineered bacteria comprise one or more gene sequences encoding trpDH and/or fldA and/or fldB and/or flD and/or fldH1. In some embodiments, the genetically engineered bacteria comprise one or more gene sequences encoding trpDH and/or fldA and/or fldB and/or flD and/or fldH2. In some embodiments, the genetically engineered bacteria comprise one or more gene sequences encoding trpDH and/or fldA and/or fldB and/or acuI and/or fldH1. In some embodiments, the genetically engineered bacteria comprise one or more gene sequences encoding trpDH and/or fldA and/or fldB and/or acuI and/or fldH2. In some embodiments, the genetically engineered bacteria comprise one or more gene sequences encoding trpDH and fldA and fldB and flD and fldH1. In some embodiments, the genetically engineered bacteria comprise one or more gene sequences encoding trpDH and fldA and fldB and flD and fldH2. In some embodiments, the genetically engineered bacteria comprise one or more gene sequences encoding trpDH and fldA and fldB and acuI and fldH1. In some embodiments, the genetically engineered bacteria comprise one or more gene sequences encoding trpDH and fldA and fldB and acuI and fldH2.

[0568] In any of these embodiments, the genetically engineered bacteria which produce indole-3-propionic acid also optionally comprise one or more gene sequence(s) comprising one or more enzymes for tryptophan production, and gene deletions/or mutations as depicted and described in FIG. 36, FIG. 40A and/or FIG. 40B and described elsewhere herein. In some embodiments, AroG and/or TrpE are replaced with feedback resistant versions to improve tryptophan production in the genetically engineered bacteria. In some embodiments, trpR and/or the tnaA gene (encoding a tryptophanase converting tryptophan into indole) are deleted to further increase levels of tryptophan produced. In some embodiments, the genetically engineered bacteria which produce indole-3-propionic acid also optionally comprise one or more gene sequence(s) which encode one or more transporter(s) as described herein, through which tryptophan can be imported. Optionally, in some embodiments, the genetically engineered bacteria which produce indole-3-propionic acid also optionally comprise one or more gene sequence(s) which encode an exporter as described herein, which can export tryptophan or any of its metabolites.

[0569] In certain embodiments, the genetically engineered bacteria comprise one or more gene sequence(s) encoding one or more enzymes for the production of tryptophan metabolites. In some embodiments, the genetically engineered bacteria comprise one or more gene sequence(s) encoding 1, 2, 3, 4, 5, 6, 7, 8, 9, 10 different tryptophan metabolites. In certain embodiments the bacteria comprise one or more gene sequence(s) encoding one or more enzymes for the production of tryptophan metabolites selected from tryptamine and/or indole-3 acetaladehyde, indole-3acetonitrile, kynurenine, kynurenic acid, indole, indole acetic acid FICZ, indole-3-propionic acid.

[0570] In some embodiments, the genetically engineered bacteria are capable of producing Indole-3-aldehyde and/or Indole Acetic Acidand/or Tryptamine under inducing conditions, e.g., under a condition(s) associated with inflammation. In some embodiments, the genetically engineered bacteria are capable of producing kynurenine in low-oxygen conditions, in the presence of certain molecules or metabolites, in the presence of molecules or metabolites associated with liver damage, metabolic disease, inflammation or an inflammatory response, or in the presence of some other metabolite that may or may not be present in the gut, such as arabinose.

[0571] In some embodiments, the gene sequences(s) are controlled by an inducible promoter. In some embodiments, the gene sequences(s) are controlled by a constitutive promoter. In some embodiments, the gene sequences(s) are controlled by an inducible and/or constritutive promoter, and are expressed during bacterial culture in vitro, e.g., for bacterial expansion, production and/or manufacture, as described herein.

### Indole

[0572] In one embodiment, the genetically engineered bacteria comprise one or more gene sequence(s) which encode one or more tryptophan catabolism enzymes, which produce indole from tryptophan. Non-limiting example of such gene sequence(s) are shown FIG. 37G and described elsewhere herein. In one embodiment, the genetically engineered bacteria comprise one or more gene sequence(s) which encode tnaA (tryptophanase). In one embodiment, the genetically engineered bacteria comprise one or more gene sequence(s) which encode tnaA from E. coli.

[0573] In any of these embodiments, the genetically engineered bacteria which produce indole from tryptophan also optionally comprise one or more gene sequence(s) comprising one or more enzymes for tryptophan production, and gene deletions/or mutations as depicted and described in FIG. 36, FIG. 40A and/or FIG. 40B and described elsewhere herein. In some embodiments, AroG and/or TrpE are replaced with feedback resistant versions to improve tryptophan production in the genetically engineered bacteria. In some embodiments, trpR and/or the tnaA gene (encoding a tryptophanase converting tryptophan into indole) are deleted to further increase levels of tryptophan produced. In some embodiments, the genetically engineered bacteria which produce indole from tryptophan also optionally comprise one or more gene sequence(s) which encode one or more transporter(s) as described herein, through which tryptophan can be imported. Optionally, in some embodiments, the genetically engineered bacteria which produce indole from tryptophan also optionally comprise one or more gene sequence(s) which encode an exporter as described herein, which can export tryptophan or any of its metabolites.

[0574] In some embodiments, the genetically engineered bacteria are capable of producing Indole-3-acetonitrile under inducing conditions, e.g., under a condition(s) associated with inflammation. In some embodiments, the genetically engineered bacteria are capable of producing kynurenine in low-oxygen conditions, in the presence of certain molecules or metabolites, in the presence of molecules or metabolites associated with liver damage, metabolic disease, inflammation or an inflammatory response, or in the presence of some other metabolite that may or may not be present in the gut, such as arabinose.

### Other Indole Metabolites

[0575] In one embodiment, the genetically engineered bacteria comprise one or more gene sequence(s) which encode one or more tryptophan catabolism enzymes, which produce indole-3-carbinol, indole-3-aldehyde, 3,3′ diindolylmethane (DIM), indolo(3,2-b) carbazole (ICZ) from indole glucosinolate taken up through the diet. Non-limiting example of such gene sequence(s) are shown FIG. 37H and described elsewhere herein. In one embodiment, the genetically engineered bacteria comprise one or more gene sequence(s) which encode pne2 (myrosinase). In one embodiment, the genetically engineered bacteria comprise one or more gene sequence(s) which encode pne2 from Arabidopsis thaliana.

[0576] In any of these embodiments, the genetically engineered bacteria also optionally comprise one or more gene sequence(s) comprising one or more enzymes for tryptophan production, and gene deletions/or mutations as depicted and described in FIG. 36, FIG. 40A and/or FIG. 40B and described elsewhere herein. In some embodiments, AroG and/or TrpE are replaced with feedback resistant versions to improve tryptophan production in the genetically engineered bacteria. In some embodiments, trpR and/or the tnaA gene (encoding a tryptophanase converting tryptophan into indole) are deleted to further increase levels of tryptophan produced. In some embodiments, the genetically engineered bacteria also optionally comprise one or more gene sequence(s) which encode one or more transporter(s) as described herein, through which tryptophan can be imported. Optionally, in some embodiments, the genetically engineered bacteria also optionally comprise one or more gene sequence(s) which encode an exporter as described herein, which can export tryptophan or any of its metabolites.

[0577] In some embodiments, the genetically engineered bacteria are capable of producing these metabolites under inducing conditions, e.g., under a condition(s) associated with inflammation. In some embodiments, the genetically engineered bacteria are capable of producing kynurenine in low-oxygen conditions, in the presence of certain molecules or metabolites, in the presence of molecules or metabolites associated with liver damage, metabolic disease, inflammation or an inflammatory response, or in the presence of some other metabolite that may or may not be present in the gut, such as arabinose.

### Tryptophan Catabolic Pathway Enzymes

[0578] Table 16A and Table 16B comprise polypeptide and polynucleotide sequences of such enzymes which are encoded by the genetically engineered bacteria of the disclosure.

TABLE 16A
Tryptophan Pathway Catabolic Enzymes

| Description | Sequence |
|---|---|
| TDC: Tryptophan | MGSIDSTNVAMSNSPVGEFKPLEAEEFRKQAHRMVDFIADYY |
| decarboxylase from | KNVETYPVLSEVEPGYLRKRIPETAPYLPEPLDDIMKDIQKDII |
| Catharanthus roseus | PGMTNWMSPNFYAFFPATVSSAAFLGEMLSTALNSVGFTWV |
| SEQ ID NO: 141 | SSPAATELEMIVMDWLAQILKLPKSFMFSGTGGGVIQNTTSES |
| | ILCTIIAARERALEKLGPDSIGKLVCYGSDQTHTMFPKTCKLA |
| | GIYPNNIRLIPTTVETDFGISPQVLRKMVEDDVAAGYVPLFLC |
| | ATLGTTSTTATDPVDSLSEIANEFGIWIHVDAAYAGSACICPEF |
| | RHYLDGIERVDSLSLSPHKWLLAYLDCTCLWVKQPHLLLRAL |
| | TTNPEYLKNKQSDLDKVVDFKNWQIATGRKFRSLKLWLILRS |
| | YGVVNLQSHIRSDVAMGKMFEEWVRSDSRFEIVVPRNFSLVC |
| | FRLKPDVSSLHVEEVNKKLLDMLNSTGRVYMTHTIVGGIYML |
| | RLAVGSSLTEEHHVRRVWDLIQKLTDDLLKEA |
| TDC: Tryptophan | MKFWRKYTQQEMDEKITESLEKTLNYDNTKTIGIPGTKLDDT |
| decarboxylase from | VFYDDHSFVKHSPYLRTFIQNPNHIGCHTYDKADILFGGTFDIE |
| Clostridium | RELIQLLAIDVLNGNDEEFDGYVTQGGTEANIQAMWVYRNY |
| sporogenes | FKKERKAKHEEIAIITSADTHYSAYKGSDLLNIDIIKVPVDFYS |
| SEQ ID NO: 142 | RKIQENTLDSIVKEAKEIGKKYFIVISNMGTTMFGSVDDPDLY |
| | ANIFDKYNLEYKIHVDGAFGGFIYPIDNKECKTDFSNKNVSSIT |
| | LDGHKMLQAPYGTGIFVSRKNLIHNTLTKEATYIENLDVTLSG |
| | SRSGSNAVAIWMVLASYGPYGWMEKINKLRNRTKWLCKQL |
| | NDMRIKYYKEDSMNIVTIEEQYVNKEIAEKYFLVPEVHNPTN |
| | NWYKIVVMEHVELDILNSLVYDLRKFNKEHLKAM |
| TYNA: Monoamine | MGSPSLYSARKTTLALAVALSFAWQAPVFAHGGEAHMVPM |
| oxidase from E. coli | DKTLKEFGADVQWDDYAQLFTLIKDGAYVKVKPGAQTAIVN |
| SEQ ID NO: 143 | GQPLALQVPVVMKDNKAWVSDTFINDVFQSGLDQTFQVEKR |
| | PHPLNALTADEIKQAVEIVKASADFKPNTRFTEISLLPPDKEAV |
| | WAFALENKPVDQPRKADVIMLDGKHIIEAVVDLQNNKLLSW |
| | QPIKDAHGMVLLDDFASVQNIINNSEEFAAAVKKRGITDAKK |
| | VITTPLTVGYFDGKDGLKQDARLLKVISYLDVGDGNYWAHPI |
| | ENLVAVVDLEQKKIVKIEEGPVVPVPMTARPFDGRDRVAPAV |
| | KPMQIIEPEGKNYTITGDMIHWRNWDFHLSMNSRVGPMISTV |
| | TYNDNGTKRKVMYEGSLGGMIVPYGDPDIGWYFKAYLDSGD |
| | YGMGTLTSPIARGKDAPSNAVLLNETIADYTGVPMEIPRAIAV |
| | FERYAGPEYKHQEMGQPNVSTERRELVVRWISTVGNYDYIFD |
| | WIFHENGTIGIDAGATGIEAVKGVKAKTMHDETAKDDTRYGT |
| | LIDHNIVGTTHQHIYNFRLDLDVDGENNSLVAMDPVVKPNTA |
| | GGPRTSTMQVNQYNIGNEQDAAQKFDPGTIRLLSNPNKENRM |
| | GNPVSYQIIPYAGGTHPVAKGAQFAPDEWIYHRLSFMDKQLW |
| | VTRYHPGERFPEGKYPNRSTHDTGLGQYSKDNESLDNTDAV |
| | VWMTTGTTHVARAEEWPIMPTEWVHTLLKPWNFFDETPTLG |
| | ALKKDK |
| AAO1: Indole-3- | MGEKAIDEDKVEAMKSSKTSLVFAINGQRFELELSSIDPSTTL |
| acetaldehyde oxidase | VDFLRNKTPFKSVKLGCGEGGCGACVVLLSKYDPLLEKVDEF |
| from Arabidopsis | TISSCLTLLCSIDGCSITTSDGLGNSRVGFHAVHERIAGFHATQ |
| thaliana | CGFCTPGMSVSMFSALLNADKSHPPPRSGFSNLTAVEAEKAV |
| SEQ ID NO: 144 | SGNLCRCTGYRPLVDACKSFAADVDIEDLGFNAFCKKGENRD |
| | EVLRRLPCYDHTSSHVCTFPEFLKKEIKNDMSLHSRKYRWSSP |
| | VSVSELQGLLEVENGLSVKLVAGNTSTGYYKEEKERKYERFI |
| | DIRKIPEFTMVRSDEKGVELGACVTISKAIEVLREEKNVSVLA |
| | KIATHMEKIANRFVRNTGTIGGNIMMAQRKQFPSDLATILVA |
| | AQATVKIMTSSSSQEQFTLEEFLQQPPLDAKSLLLSLEIPSWHS |
| | AKKNGSSEDSILLFETYRAAPRPLGNALAFLNAAFSAEVTEAL |
| | DGIVVNDCQLVFGAYGTKHAHRAKKVEEFLTGKVISDEVLM |
| | EAISLLKDEIVPDKGTSNPGYRSSLAVTFLFEFFGSLTKKNAKT |
| | TNGWLNGGCKEIGFDQNVESLKPEAMLSSAQQIVENQEHSPV |
| | GKGITKAGACLQASGEAVYVDDIPAPENCLYGAFIYSTMPLA |
| | RIKGIRFKQNRVPEGVLGIITYKDIPKGGQNIGTNGFFTSDLLF |
| | AEEVTHCAGQIIAFLVADSQKHADIAANLVVIDYDTKDLKPPI |
| | LSLEEAVENFSLFEVPPPLRGYPVGDITKGMDEAEHKILGSMS |
| | FGSQYFFYMETQTALAVPDEDNCMVVYSSTQTPEFVHQTIAG |
| | CLGVPENNVRVITRRVGGGFGGKAVKSMPVAAACALAASK |
| | MQRPVRTYVNRKTDMITTGGRHPMKVTYSVGFKSNGKITAL |
| | DVEVLLDAGLTEDISPLMPKGIQGALMKYDWGALSFNVKVC |
| | KTNTVSRTALRAPGDVQGSYIGEAIIEKVASYLSVDVDEIRKV |
| | NLHTYESLRLFHSAKAGEFSEYTLPLLWDRIDEFSGFNKRRKV |
| | VEEFNASNKWRKRGISRVPAVYAVNMRSTPGRVSVLGDGSIV |
| | VEVQGIEIGQGLWTKVKQMAAYSLGLIQCGTTSDELLKKIRVI |
| | QSDTLSMVQGSMTAGSTTSEASSEAVRICCDGLVERLLPVKT |
| | ALVEQTGGPVTWDSLISQAYQQSINMSVSSKYMPDSTGEYLN |
| | YGIAASEVEVNVLTGETTILRTDIIYDCGKSLNPAVDLGQIEGA |
| | FVQGLGFFMLEEFLMNSDGLVVTDSTWTYKIPTVDTIPRQFN |
| | VEILNSGQHKNRVLSSKASGEPPLLLAASVHCAVRAAVKEAR |
| | KQILSWNSNKQGTDMYFELPVPATMPIVKEFCGLDVVEKYLE |
| | WKIQQRKNV |
| ARO9: L-tryptophan | MTAGSAPPVDYTSLKKNFQPFLSRRVENRSLKSFWDASDISD |
| amino transferase | DVIELAGGMPNERFFPIESMDLKISKVPFNDNPKWHNSFTTAH |
| from S. cerevisae | LDLGSPSELPIARSFQYAETKGLPPLLHFVKDFVSRINRPAFSD |
| SEQ ID NO: 145 | ETESNWDVILSGGSNDSMFKVFETICDESTTVMIEEFTFTPAM |
| | SNVEATGAKVIPIKMNLTFDRESQGIDVEYLTQLLDNWSTGP |
| | YKDLNKPRVLYTIATGQNPTGMSVPQWKREKIYQLAQRHDF |
| | LIVEDDPYGYLYFPSYNPQEPLENPYHSSDLTTERYLNDFLMK |
| | SFLTLDTDARVIRLETFSKIFAPGLRLSFIVANKFLLQKILDLAD |
| | ITTRAPSGTSQAIVYSTIKAMAESNLSSSLSMKEAMFEGWIRW |
| | IMQIASKYNHRKNLTLKALYETESYQAGQFTVMEPSAGMFIII |
| | KINWGNFDRPDDLPQQMDILDKFLLKNGVKVVLGYKMAVCP |
| | NYSKQNSDFLRLTIAYARDDDQLIEASKRIGSGIKEFFDNYKS |
| aspC: aspartate | MFENITAAPADPILGLADLFRADERPGKINLGIGVYKDETGKT |
| amino transferase | PVLTSVKKAEQYLLENETTKNYLGIDGIPEFGRCTQELLFGKG |
| from E. coli | SALINDKRARTAQTPGGTGALRVAADFLAKNTSVKRVWVSN |
| SEQ ID NO: 146 | PSWPNHKSVFNSAGLEVREYAYYDAENHTLDFDALINSLNEA |
| | QAGDVVLFHGCCHNPTGIDPTLEQWQTLAQLSVEKGWLPLF |
| | DFAYQGFARGLEEDAEGLRAFAAMHKELIVASSYSKNFGLYN |
| | ERVGACTLVAADSETVDRAFSQMKAAIRANYSNPPAHGASV |
| | VATILSNDALRAIWEQELTDMRQRIQRMRQLFVNTLQEKGAN |
| | RDFSFIIKQNGMFSFSGLTKEQVLRLREEFGVYAVASGRVNVA |
| | GMTPDNMAPLCEAIVAVL |
| TAA1: L-tryptophan- | MVKLENSRKPEKISNKNIPMSDFVVNLDHGDPTAYEEYWRK |
| pyruvate | MGDRCTVTIRGCDLMSYFSDMTNLCWFLEPELEDAIKDLHGV |
| amino transferase | VGNAATEDRYIVVGTGSTQLCQAAVHALSSLARSQPVSVVA |
| from Arabidopsis | AAPFYSTYVEETTYVRSGMYKWEGDAWGFDKKGPYIELVTS |
| thaliana | PNNPDGTIRETVVNRPDDDEAKVIHDFAYYWPHYTPITRRQD |
| SEQ ID NO: 147 | HDIMLFTFSKITGHAGSRIGWALVKDKEVAKKMVEYIIVNSIG |
| | VSKESQVRTAKILNVLKETCKSESESENFFKYGREMMKNRWE |
| | KLREVVKESDAFTLPKYPEAFCNYFGKSLESYPAFAWLGTKE |
| | ETDLVSELRRHKVMSRAGERCGSDKKHVRVSMLSREDVFNV |
| | FLERLANMKLIKSIDL |
| STAO: L-tryptophan | MTAPLQDSDGPDDAIGGPKQVTVIGAGIAGLVTAYELERLGH |
| oxidase from | HVQIIEGSDDIGGRIHTHRFSGAGGPGPFAEMGAMRIPAGHRL |
| streptomyces sp. | TMHYIAELGLQNQVREFRTLFSDDAAYLPSSAGYLRVREAHD |
| TP-A0274 | TLVDEFATGLPSAHYRQDTLLFGAWLDASIRAIAPRQFYDGL |
| SEQ ID NO: 148 | HNDIGVELLNLVDDIDLTPYRCGTARNRIDLHALFADHPRVR |
| | ASCPPRLERFLDDVLDETSSSIVRLKDGMDELPRRLASRIRGKI |
| | SLGQEVTGIDVHDDTVTLTVRQGLRTVTRTCDYVVCTIPFTVL |
| | RTLRLTGFDQDKLDIVHETKYWPATKIAFHCREPFWEKDGIS |
| | GGASFTGGHVRQTYYPPAEGDPALGAVLLASYTIGPDAEALA |
| | RMDEAERDALVAKELSVMHPELRRPGMVLAVAGRDWGARR |
| | WSRGAATVRWGQEAALREAERRECARPQKGLFFAGEHCSSK |
| | PAWIEGAIESAIDAAHEIEWYEPRASRVFAASRLSRSDRSA |
| ipdC: Indole-3- | MRTPYCVADYLLDRLTDCGADHLFGVPGDYNLQFLDHVIDS |
| pyruvate | PDICWVGCANELNASYAADGYARCKGFAALLTTFGVGELSA |
| decarboxylase from | MNGIAGSYAEHVPVLHIVGAPGTAAQQRGELLHHTLGDGEFR |
| Enterobacter cloacae | HFYHMSEPITVAQAVLTEQNACYEIDRVLTTMLRERRPGYLM |
| SEQ ID NO: 149 | LPADVAKKAATPPVNALTHKQAHADSACLKAFRDAAENKLA |
| | MSKRTALLADFLVLRHGLKHALQKWVKEVPMAHATMLMG |
| | KGIFDERQAGFYGTYSGSASTGAVKEAIEGADTVLCVGTRFT |
| | DTLTAGFTHQLTPAQTIEVQPHAARVGDVWFTGIPMNQAIET |
| | LVELCKQHVHAGLMSSSSGAIPFPQPDGSLTQENFWRTLQTFI |
| | RPGDIILADQGTSAFGAIDLRLPADVNFIVQPLWGSIGYTLAA |
| | AFGAQTACPNRRVIVLTGDGAAQLTIQELGSMLRDKQHPIILV |
| | LNNEGYTVERAIHGAEQRYNDIALWNWTHIPQALSLDPQSEC |
| | WRVSEAEQLADVLEKVAHHERLSLIEVMLPKADIPPLLGALT |
| | KALEACNNA |
| IAD1: Indole-3- | MPTLNLDLPNGIKSTIQADLFINNKFVPALDGKTFATINPSTGK |
| acetaldehyde | EIGQVAEASAKDVDLAVKAAREAFETTWGENTPGDARGRLLI |
| dehydrogenase from | KLAELVEANIDELAAIESLDNGKAFSIAKSFDVAAVAANLRY |
| Ustilago maydis | YGGWADKNHGKVMEVDTKRLNYTRHEPIGVCGQIIPWNFPL |
| SEQ ID NO: 150 | LMFAWKLGPALATGNTIVLKTAEQTPLSAIKMCELIVEAGFPP |
| | GVVNVISGFGPVAGAAISQHMDIDKIAFTGSTLVGRNIMKAA |
| | ASTNLKKVTLELGGKSPNIIFKDADLDQAVRWSAFGIMFNHG |
| | QCCCAGSRVYVEESIYDAFMEKMTAHCKALQVGDPFSANTF |
| | QGPQVSQLQYDRIMEYIESGKKDANLALGGVRKGNEGYFIEP |
| | TIFTDVPHDAKIAKEEIFGPVVVVSKFKDEKDLIRIANDSIYGL |
| | AAAVFSRDISRAIETAHKLKAGTVWVNCYNQLIPQVPFGGYK |
| | ASGIGRELGEYALSNYTNIKAVHVNLSQPAPI |
| YUC2: indole-3- | MEFVTETLGKRIHDPYVEETRCLMIPGPIIVGSGPSGLATAACL |
| pyruvate | KSRDIPSLILERSTCIASLWQHKTYDRLRLHLPKDFCELPLMPF |
| monoxygenase from | PSSYPTYPTKQQFVQYLESYAEHFDLKPVFNQTVEEAKFDRR |
| Arabidopsis thaliana | CGLWRVRTTGGKKDETMEYVSRWLVVATGENAEEVMPEID |
| SEQ ID NO: 151 | GIPDFGGPILHTSSYKSGEIFSEKKILVVGCGNSGMEVCLDLCN |
| | FNALPSLVVRDSVHVLPQEMLGISTFGISTSLLKWFPVHVVDR |
| | FLLRMSRLVLGDTDRLGLVRPKLGPLERKIKCGKTPVLDVGT |
| | LAKIRSGHIKVYPELKRVMHYSAEFVDGRVDNFDAIILATGY |
| | KSNVPMWLKGVNMFSEKDGFPHKPFPNGWKGESGLYAVGF |
| | TKLGLLGAAIDAKKIAEDIEVQRHFLPLARPQHC |
| IaaM: Tryptophan 2- | MYDHFNSPSIDILYDYGPFLKKCEMTGGIGSYSAGTPTPRVAI |
| monooxygenase from | VGAGISGLVAATELLRAGVKDVVLYESRDRIGGRVWSQVFD |
| Pseudomonas | QTRPRYIAEMGAMRFPPSATGLFHYLKKFGISTSTTFPDPGVV |
| savastanoi | DTELHYRGKRYHWPAGKKPPELFRRVYEGWQSLLSEGYLLE |
| SEQ ID NO: 152 | GGSLVAPLDITAMLKSGRLEEAAIAWQGWLNVFRDCSFYNAI |
| | VCIFTGRHPPGGDRWARPEDFELFGSLGIGSGGFLPVFQAGFT |
| | EILRMVINGYQSDQRLIPDGISSLAARLADQSFDGKALRDRVC |
| | FSRVGRISREAEKIIIQTEAGEQRVFDRVIVTSSNRAMQMIHCL |
| | TDSESFLSRDVARAVRETHLTGSSKLFILTRTKFWIKNKLPTTI |
| | QSDGLVRGVYCLDYQPDEPEGHGVVLLSYTWEDDAQKMLA |
| | MPDKKTRCQVLVDDLAAIHPTFASYLLPVDGDYERYVLHHD |
| | WLTDPHSAGAFKLNYPGEDVYSQRLFFQPMTANSPNKDTGL |
| | YLAGCSCSFAGGWIEGAVQTALNSACAVLRSTGGQLSKGNPL |
| | DCINASYRY |
| iaaH: | MHEIITLESLCQALADGEIAAAELRERALDTEARLARLNCFIRE |
| Indoleacetamide | GDAVSQFGEADHAMKGTPLWGMPVSFKDNICVRGLPLTAGT |
| hydrolase from | RGMSGFVSDQDAAIVSQLRALGAVVAGKNNMHELSFGVTSI |
| Pseudomonas | NPHWGTVGNPVAPGYCAGGSSGGSAAAVASGIVPLSVGTDT |
| savastanoi | GGSIRIPAAFCGITGFRPTTGRWSTAGIIPVSHTKDCVGLLTRT |
| SEQ ID NO: 153 | AGDAGFLYGLLSGKQQSFPLSRTAPCRIGLPVSMWSDLDGEV |
| | ERACVNALSLLRKTGFEFIEIDDADIVELNQTLTFTVPLYEFFA |
| | DLAQSLLSLGWKHGIHHIFAQVDDANVKGIINHHLGEGAIKP |
| | AHYLSSLQNGELLKRKMDELFARHNIELLGYPTVPCRVPHLD |
| | HADRPEFFSQAIRNTDLASNAMLPSITIPVGPEGRLPVGLSFDA |
| | LRGRDALLLSRVSAIEQVLGFVRKVLPHTT |
| TrpDH: Tryptophan | MLLFETVREMGHEQVLFCHSKNPEIKAIIAIHDTTLGPAMGAT |
| dehydrogenase from | RILPYINEEAALKDALRLSRGMTYKAACANIPAGGGKAVIIAN |
| Nostoc punctiforme | PENKTDDLLRAYGRFVDSLNGRFITGQDVNITPDDVRTISQET |
| NIES-2108 | KYVVGVSEKSGGPAPITSLGVFLGIKAAVESRWQSKRLDGMK |
| SEQ ID NO: 154 | VAVQGLGNVGKNLCRHLHEHDVQLFVSDVDPIKAEEVKRLF |
| | GATVVEPTEIYSLDVDIFAPCALGGILNSHTIPFLQASIIAGAAN |
| | NQLENEQLHSQMLAKKGILYSPDYVINAGGLINVYNEMIGYD |
| | EEKAFKQVHNIYDTLLAIFEIAKEQGVTTNDAARRLAEDRINN |
| | SKRSKSKAIAA |
| CYP79B2: | MNTFTSNSSDLTTTATETSSFSTLYLLSTLQAFVAITLVMLLKK |
| tryptophan N- | LMTDPNKKKPYLPPGPTGWPIIGMIPTMLKSRPVFRWLHSIMK |
| monooxygenase from | QLNTEIACVKLGNTHVITVTCPKIAREILKQQDALFASRPLTY |
| Arabidopsis thaliana | AQKILSNGYKTCVITPFGDQFKKMRKVVMTELVCPARHRWL |
| SEQ ID NO: 155 | HQKRSEENDHLTAWVYNMVKNSGSVDFRFMTRHYCGNAIK |
| | KLMFGTRTFSKNTAPDGGPTVEDVEHMEAMFEALGFTFAFCI |
| | SDYLPMLTGLDLNGHEKIMRESSAIMDKYHDPIIDERIKMWR |
| | EGKRTQIEDFLDIFISIKDEQGNPLLTADEIKPTIKELVMAAPDN |
| | PSNAVEWAMAEMVNKPEILRKAMEEIDRVVGKERLVQESDIP |
| | KLNYVKAILREAFRLHPVAAFNLPHVALSDTTVAGYHIPKGS |
| | QVLLSRYGLGRNPKVWADPLCFKPERHLNECSEVTLTENDLR |
| | FISFSTGKRGCAAPALGTALTTMMLARLLQGFTWKLPENETR |
| | VELMESSHDMFLAKPLVMVGDLRLPEHLYPTVK |
| CYP79B3: | MDTLASNSSDLTTKSSLGMSSFTNMYLLTTLQALAALCFLMI |
| tryptophan N- | LNKIKSSSRNKKLHPLPPGPTGFPIVGMIPAMLKNRPVFRWLH |
| monooxygenase from | SLMKELNTEIACVRLGNTHVIPVTCPKIAREIFKQQDALFASRP |
| Arabidopsis thaliana | LTYAQKILSNGYKTCVITPFGEQFKKMRKVIMTEIVCPARHR |
| SEQ ID NO: 156 | WLHDNRAEETDHLTAWLYNMVKNSEPVDLRFVTRHYCGNA |
| | IKRLMFGTRTFSEKTEADGGPTLEDIEHMDAMFEGLGFTFAFC |
| | ISDYLPMLTGLDLNGHEKIMRESSAIMDKYHDPIIDERIKMWR |
| | EGKRTQIEDFLDIFISIKDEAGQPLLTADEIKPTIKELVMAAPDN |
| | PSNAVEWAIAEMINKPEILHKAMEEIDRVVGKERFVQESDIPK |
| | LNYVKAIIREAFRLHPVAAFNLPHVALSDTTVAGYHIPKGSQV |
| | LLSRYGLGRNPKVWSDPLSFKPERHLNECSEVTLTENDLRFIS |
| | FSTGKRGCAAPALGTAITTMMLARLLQGFKWKLAGSETRVE |
| | LMESSHDMFLSKPLVLVGELRLSEDLYPMVK |
| CYP71A13 : | MSNIQEMEMILSISLCLTTLITLLLLRRFLKRTATKVNLPPSPW |
| indoleacetaldoxime | RLPVIGNLHQLSLHPHRSLRSLSLRYGPLMLLHFGRVPILVVSS |
| dehydratase from | GEAAQEVLKTHDHKFANRPRSKAVHGLMNGGRDVVFAPYG |
| Arabidopis thaliana | EYWRQMKSVCILNLLTNKMVESFEKVREDEVNAMIEKLEKA |
| SEQ ID NO: 157 | SSSSSSENLSELFITLPSDVTSRVALGRKHSEDETARDLKKRVR |
| | QIMELLGEFPIGEYVPILAWIDGIRGFNNKIKEVSRGFSDLMDK |
| | VVQEHLEASNDKADFVDILLSIEKDKNSGFQVQRNDIKFMILD |
| | MFIGGTSTTSTLLEWTMTELIRSPKSMKKLQDEIRSTIRPHGSY |
| | IKEKEVENMKYLKAVIKEVLRLHPSLPMILPRLLSEDVKVKGY |
| | NIAAGTEVIINAWAIQRDTAIWGPDAEEFKPERHLDSGLDYHG |
| | KNLNYIPFGSGRRICPGINLALGLAEVTVANLVGRFDWRVEA |
| | GPNGDQPDLTEAIGIDVCRKFPLIAFPSSVV |
| PEN2: myrosinase | MAHLQRTFPTEMSKGRASFPKGFLFGTASSSYQYEGAVNEGA |
| from Arabidopsis | RGQSVWDHFSNRFPHRISDSSDGNVAVDFYHRYKEDIKRMK |
| thaliana | DINMDSFRLSIAWPRVLPYGKRDRGVSEEGIKFYNDVIDELLA |
| SEQ ID NO: 158 | NEITPLVTIFHWDIPQDLEDEYGGFLSEQIIDDFRDYASLCFERF |
| | GDRVSLWCTMNEPWVYSVAGYDTGRKAPGRCSKYVNGASV |
| | AGMSGYEAYIVSHNMLLAHAEAVEVFRKCDHIKNGQIGIAHN |
| | PLWYEPYDPSDPDDVEGCNRAMDFMLGWHQHPTACGDYPE |
| | TMKKSVGDRLPSFTPEQSKKLIGSCDYVGINYYSSLFVKSIKH |
| | VDPTQPTWRTDQGVDWMKTNIDGKQIAKQGGSEWSFTYPTG |
| | LRNILKYVKKTYGNPPILITENGYGEVAEQSQSLYMYNPSIDT |
| | ERLEYIEGHIHAIHQAIHEDGVRVEGYYVWSLLDNFEWNSGY |
| | GVRYGLYYIDYKDGLRRYPKMSALWLKEFLRFDQEDDSSTS |
| | KKEEKKESYGKQLLHSVQDSQFVHSIKDSGALPAVLGSLFVV |
| | SATVGTSLFFKGANN |
| Nit1: Nitrilase from | MSSTKDMSTVQNATPFNGVAPSTTVRVTIVQSSTVYNDTPATI |
| Arabidopsis thaliana | DKAEKYIVEAASKGAELVLFPEGFIGGYPRGFRFGLAVGVHN |
| SEQ ID NO: 159 | EEGRDEFRKYHASAIHVPGPEVARLADVARKNHVYLVMGAI |
| | EKEGYTLYCTVLFFSPQGQFLGKHRKLMPTSLERCIWGQGDG |
| | STIPVYDTPIGKLGAAICWENRMPLYRTALYAKGIELYCAPTA |
| | DGSKEWQSSMLHIAIEGGCFVLSACQFCQRKHFPDHPDYLFT |
| | DWYDDKEHDSIVSQGGSVIISPLGQVLAGPNFESEGLVTADID |
| | LGDIARAKLYFDSVGHYSRPDVLHLTVNEHPRKSVTFVTKVE |
| | KAEDDSNK |
| IDO1: indoleamine | MAHAMENSWTISKEYHIDEEVGFALPNPQENLPDFYNDWMFI |
| 2,3-dioxygenase from | AKHLPDLIESGQLRERVEKLNMLSIDHLTDHKSQRLARLVLG |
| homo sapiens | CITMAYVWGKGHGDVRKVLPRNIAVPYCQLSKKLELPPILVY |
| SEQ ID NO: 160 | ADCVLANWKKKDPNKPLTYENMDVLFSFRDGDCSKGFFLVS |
| | LLVEIAAASAIKVIPTVFKAMQMQERDTLLKALLEIASCLEKA |
| | LQVFHQIHDHVNPKAFFSVLRIYLSGWKGNPQLSDGLVYEGF |
| | WEDPKEFAGGSAGQSSVFQCFDVLLGIQQTAGGGHAAQFLQ |
| | DMRRYMPPAHRNFLCSLESNPSVREFVLSKGDAGLREAYDA |
| | CVKALVSLRSYHLQIVTKYILIPASQQPKENKTSEDPSKLEAK |
| | GTGGTDLMNFLKTVRSTTEKSLLKEG |
| TDO2: tryptophan | MSGCPFLGNNFGYTFKKLPVEGSEEDKSQTGVNRASKGGLIY |
| 2,3-dioxygenase from | GNYLHLEKVLNAQELQSETKGNKIHDEHLFIITHQAYELWFK |
| homo sapiens | QILWELDSVREIFQNGHVRDERNMLKVVSRMHRVSVILKLLV |
| SEQ ID NO: 161 | QQFSILETMTALDFNDFREYLSPASGFQSLQFRLLENKIGVLQ |
| | NMRVPYNRRHYRDNFKGEENELLLKSEQEKTLLELVEAWLE |
| | RTPGLEPHGFNFWGKLEKNITRGLEEEFIRIQAKEESEEKEEQV |
| | AEFQKQKEVLLSLFDEKRHEHLLSKGERRLSYRALQGALMIY |
| | FYREEPRFQVPFQLLTSLMDIDSLMTKWRYNHVCMVHRMLG |
| | SKAGTGGSSGYHYLRSTVSDRYKVFVDLFNLSTYLIPRHWIPK |
| | MNPTIHKFLYTAEYCDSSYFSSDESD |
| BNA2: indoleamine | MNNTSITGPQVLHRTKMRPLPVLEKYCISPHHGFLDDRLPLTR |
| 2,3-dioxygenase from | LSSKKYMKWEEIVADLPSLLQEDNKVRSVIDGLDVLDLDETIL |
| S. cerevisiae | GDVRELRRAYSILGFMAHAYIWASGTPRDVLPECIARPLLETA |
| SEQ ID NO: 162 | HILGVPPLATYSSLVLWNFKVTDECKKTETGCLDLENITTINTF |
| | TGTVDESWFYLVSVRFEKIGSACLNHGLQILRAIRSGDKGDA |
| | NVIDGLEGLAATIERLSKALMEMELKCEPNVFYFKIRPFLAGW |
| | TNMSHMGLPQGVRYGAEGQYRIFSGGSNAQSSLIQTLDILLG |
| | VKHTANAAHSSQGDSKINYLDEMKKYMPREHREFLYHLESV |
| | CNIREYVSRNASNRALQEAYGRCISMLKIFRDNHIQIVTKYIIL |
| | PSNSKQHGSNKPNVLSPIEPNTKASGCLGHKVASSKTIGTGGT |
| | RLMPFLKQCRDETVATADIKNEDKN |
| Afmid: Kynurenine | MAFPSLSAGQNPWRNLSSEELEKQYSPSRWVIHTKPEEVVGN |
| formamidase from | FVQIGSQATQKARATRRNQLDVPYGDGEGEKLDIYFPDEDSK |
| mouse | AFPLFLFLHGGYWQSGSKDDSAFMVNPLTAQGIVVVIVAYDI |
| SEQ ID NO: 163 | APKGTLDQMVDQVTRSVVFLQRRYPSNEGIYLCGHSAGAHL |
| | AAMVLLARWTKHGVTPNLQGFLLVSGIYDLEPLIATSQNDPL |
| | RMTLEDAQRNSPQRHLDVVPAQPVAPACPVLVLVGQHDSPE |
| | FHRQSKEFYETLLRVGWKASFQQLRGVDHFDIIENLTREDDV |
| | LTQIILKTVFQKL |
| BNA3: kynurenine-- | MKQRFIRQFTNLMSTSRPKVVANKYFTSNTAKDVWSLTNEA |
| oxoglutarate | AAKAANNSKNQGRELINLGQGFFSYSPPQFAIKEAQKALDIPM |
| transaminase from S. | VNQYSPTRGRPSLINSLIKLYSPIYNTELKAENVTVTTGANEGI |
| cerevisae | LSCLMGLLNAGDEVIVFEPFFDQYIPNIELCGGKVVYVPINPPK |
| SEQ ID NO: 164 | ELDQRNTRGEEWTIDFEQFEKAITSKTKAVIINTPHNPIGKVFT |
| | REELTTLGNICVKHNVVIISDEVYEHLYFTDSFTRIATLSPEIGQ |
| | LTLTVGSAGKSFAATGWRIGWVLSLNAELLSYAAKAHTRICF |
| | ASPSPLQEACANSINDALKIGYFEKMRQEYINKFKIFTSIFDEL |
| | GLPYTAPEGTYFVLVDFSKVKIPEDYPYPEEILNKGKDFRISH |
| | WLINELGVVAIPPTEFYIKEHEKAAENLLRFAVCKDDAYLEN |
| | AVERLKLLKDYL |
| GOT2: Aspartate | MALLHSGRVLPGIAAAFHPGLAAAASARASSWWTHVEMGPP |
| aminotransferase, | DPILGVTEAFKRDTNSKKMNLGVGAYRDDNGKPYVLPSVRK |
| mitochondrial from | AEAQIAAKNLDKEYLPIGGLAEFCKASAELALGENSEVLKSG |
| homo sapiens | RFVTVQTISGTGALRIGASFLQRFFKFSRDVFLPKPTWGNHTPI |
| SEQ ID NO: 165 | FRDAGMQLQGYRYYDPKTCGFDFTGAVEDISKIPEQSVLLLH |
| | ACAHNPTGVDPRPEQWKEIATVVKKRNLFAFFDMAYQGFAS |
| | GDGDKDAWAVRHFIEQGINVCLCQSYAKNMGLYGERVGAFT |
| | MVCKDADEAKRVESQLKILIRPMYSNPPLNGARIAAAILNTPD |
| | LRKQWLQEVKVMADRIIGMRTQLVSNLKKEGSTHNWQHITD |
| | QIGMFCFTGLKPEQVERLIKEFSIYMTKDGRISVAGVTSSNVG |
| | YLAHAIHQVTK |
| AADAT: | MNYARFITAASAARNPSPIRTMTDILSRGPKSMISLAGGLPNP |
| Kynurenine/alpha- | NMFPFKTAVITVENGKTIQFGEEMMKRALQYSPSAGIPELLSW |
| aminoadipate | LKQLQIKLHNPPTIHYPPSQGQMDLCVTSGSQQGLCKVFEMII |
| aminotransferase, | NPGDNVLLDEPAYSGTLQSLHPLGCNIINVASDESGIVPDSLR |
| mitochondrial | DILSRWKPEDAKNPQKNTPKFLYTVPNGNNPTGNSLTSERKK |
| SEQ ID NO: 166 | EIYELARKYDFLIIEDDPYYFLQFNKFRVPTFLSMDVDGRVIRA |
| | DSFSKITSSGLRIGFLTGPKPLIERVILHIQVSTLHPSTFNQLMIS |
| | QLLHEWGEEGFMAHVDRVIDFYSNQKDAILAAADKWLTGLA |
| | EWHVPAAGMFLWIKVKGINDVKELIEEKAVKMGVLMLPGN |
| | AFYVDSSAPSPYLRASFSSASPEQMDVAFQVLAQLIKESL |
| CCLB1: Kynurenine- | MAKQLQARRLDGIDYNPWVEFVKLASEHDVVNLGQGFPDFP |
| -oxoglutarate | PPDFAVEAFQHAVSGDFMLNQYTKTFGYPPLTKILASFFGELL |
| transaminase 1 from | GQEIDPLRNVLVTVGGYGALFTAFQALVDEGDEVIIIEPFFDC |
| homo sapiens | YEPMTMMAGGRPVFVSLKPGPIQNGELGSSSNWQLDPMELA |
| SEQ ID NO: 167 | GKFTSRTKALVLNTPNNPLGKVFSREELELVASLCQQHDVVCI |
| | TDEVYQWMVYDGHQHISIASLPGMWERTLTIGSAGKTFSATG |
| | WKVGWVLGPDHIMKHLRTVHQNSVFHCPTQSQAAVAESFER |
| | EQLLFRQPSSYFVQFPQAMQRCRDHMIRSLQSVGLKPIIPQGS |
| | YFLITDISDFKRKMPDLPGAVDEPYDRRFVKWMIKNKGLVAI |
| | PVSIFYSVPHQKHFDHYIRFCFVKDEATLQAMDEKLRKWKVE |
| | L |
| CCLB2: kynurenine-- | MFLAQRSLCSLSGRAKFLKTISSSKILGFSTSAKMSLKFTNAKR |
| oxoglutarate | IEGLDSNVWIEFTKLAADPSVVNLGQGFPDISPPTYVKEELSKI |
| transaminase 3 from | AAIDSLNQYTRGFGHPSLVKALSYLYEKLYQKQIDSNKEILVT |
| homo sapiens | VGAYGSLFNTIQALIDEGDEVILIVPFYDCYEPMVRMAGATPV |
| SEQ ID NO: 168 | FIPLRSKPVYGKRWSSSDWTLDPQELESKFNSKTKAIILNTPHN |
| | PLGKVYNREELQVIADLCIKYDTLCISDEVYEWLVYSGNKHL |
| | KIATFPGMWERTITIGSAGKTFSVTGWKLGWSIGPNHLIKHLQ |
| | TVQQNTIYTCATPLQEALAQAFWIDIKRMDDPECYFNSLPKEL |
| | EVKRDRMVRLLESVGLKPIVPDGGYFIIADVSLLDPDLSDMK |
| | NNEPYDYKFVKWMTKHKKLSAIPVSAFCNSETKSQFEKFVRF |
| | CFIKKDSTLDAAEEIIKAWSVQKS |
| TnaA: tryptophanase | MENFKHLPEPFRIRVIEPVKRTTRAYREEAIIKSGMNPFLLDSE |
| from E. coli | DVFIDLLTDSGTGAVTQSMQAAMMRGDEAYSGSRSYYALAE |
| SEQ ID NO: 140 | SVKNIFGYQYTIPTHQGRGAEQIYIPVLIKKREQEKGLDRSKM |
| | VAFSNYFFDTTQGHSQINGCTVRNVYIKEAFDTGVRYDFKGN |
| | FDLEGLERGIEEVGPNNVPYIVATITSNSAGGQPVSLANLKAM |
| | YSIAKKYDIPVVMDSARFAENAYFIKQREAEYKDWTIEQITRE |
| | TYKYADMLAMSAKKDAMVPMGGLLCMKDDSFFDVYTECRT |
| | LCVVQEGFPTYGGLEGGAMERLAVGLYDGMNLDWLAYRIA |
| | QVQYLVDGLEEIGVVCQQAGGHAAFVDAGKLLPHIPADQFP |
| | AQALACELYKVAGIRAVEIGSFLLGRDPKTGKQLPCPAELLRL |
| | TIPRATYTQTHMDFIIEAFKHVKENAANIKGLTFTYEPKVLRH |
| | FTAKLKEV |
| Trp | MTATTISIETVPQAPAAGTKTNGTSGKYNPRTYLSDRAKVTEI |
| aminotransferase | DGSDAGRPNPDTFPFNSITLNLKPPLGLPESSNNMPVSITIEDPD |
| (EC 2.6.1.27); | LATALQYAPSAGIPKLREWLADLQAHVHERPRGDYAISVGSG |
| tryptophan | SQDLMFKGFQAVLNPGDPVLLETPMYSGVLPALRILKADYAE |
| aminotransferase | VDVDDQGLSAKNLEKVLSEWPADKKRPRVLYTSPIGSNPSGC |
| [Cryptococcus | SASKERKLEVLKVCKKYDVLIFEDDPYYYLAQELIPSYFALEK |
| deuterogattii R265] | QVYPEGGHVVRFDSFSKLLSAGMRLGFATGPKEILHAIDVSTA |
| SEQ ID NO: 169 | GANLHTSAVSQGVALRLMQYWGIEGFLAHGRAVAKLYTERR |
| | AQFEATAHKYLDGLATWVSPVAGMFLWIDLRPAGIEDSYELI |
| | RHEALAKGVLGVPGMAFYPTGRKSSHVRVSFSIVDLEDESDL |
| | GFQRLAEAIKDKRKALGLA |
| Tryptophan | MSQVIKKKRNTFMIGTEYILNSTQLEEAIKSFVHDFCAEKHEIH |
| Decarboxylase (EC | DQPVVVEAKEHQEDKIKQIKIPEKGRPVNEVVSEMMNEVYRY |
| 4.1.1.28) Chain A, | RGDANHPRFFSFVPGPASSVSWLGDIMTSAYNIHAGGSKLAP |
| Ruminococcus | MVNCIEQEVLKWLAKQVGFTENPGGVFVSGGSMANITALTA |
| Gnavus | ARDNKLTDINLHLGTAYISDQTHSSVAKGLRIIGITDSRIRRIPT |
| SEQ ID NO: 170 | NSHFQMDTTKLEEAIETDKKSGYIPFVVIGTAGTTNTGSIDPLT |
| | EISALCKKHDMWFHIDGAYGASVLLSPKYKSLLTGTGLADSIS |
| | WDAHKWLFQTYGCAMVLVKDIRNLFHSFHVNPEYLKDLEN |
| | DIDNVNTWDIGMELTRPARGLKLWLTLQVLGSDLIGSAIEHG |
| | FQLAVWAEEALNPKKDWEIVSPAQMAMINFRYAPKDLTKEE |
| | QDILNEKISHRILESGYAAIFTTVLNGKTVLRICAIHPEATQED |
| | MQHTIDLLDQYGREIYTEMKKa |

TABLE 16B
Tryptophan Pathway Catabolic Enzymes

| Description | Sequence |
|---|---|
| Trp | ATGACGGCAACTACAATTTCTATTGAGACCGTACCTC |
| aminotransferase | AGGCCCCGGCGGCGGGGACCAAAACTAATGGGACTT |
| (EC 2.6.1.27); | CAGGAAAATACAACCCCCGCACTTACCTGTCCGACC |
| tryptophan | GCGCCAAAGTCACTGAGATTGATGGATCTGACGCCG |
| aminotransferase | GTCGCCCCAATCCCGATACTTTCCCATTTAACTCGAT |
| [Cryptococcus | TACCTTAAATTTGAAACCACCTTTAGGCTTGCCCGAG |
| deuterogattii R265], | AGTTCAAATAACATGCCGGTCTCTATCACGATTGAA |
| codon optimized for | GACCCCGATTTAGCGACGGCCTTACAATATGCACCT |
| expression in E. coli | AGCGCCGGTATTCCTAAGCTGCGCGAATGGCTGGCT |
| SEQ ID NO: 171 | GACTTACAAGCTCACGTTCATGAGCGCCCCCGTGGC |
| | GATTATGCCATCTCGGTCGGGTCGGGGTCACAGGAT |
| | TTGATGTTTAAGGGCTTCCAAGCTGTCTTGAATCCAG |
| | GTGATCCAGTCCTTCTGGAAACCCCAATGTATTCAGG |
| | TGTTCTGCCAGCGCTGCGCATTCTGAAGGCGGATTAT |
| | GCAGAAGTTGATGTAGACGACCAGGGGTTATCTGCT |
| | AAAAACCTTGAAAAAGTTTTATCAGAGTGGCCCGCA |
| | GATAAGAAGCGTCCTCGTGTCCTGTATACGTCGCCA |
| | ATCGGCTCCAATCCTTCCGGATGTTCAGCATCCAAGG |
| | AACGCAAGTTAGAGGTACTGAAAGTCTGTAAGAAGT |
| | ACGATGTGCTGATCTTCGAAGACGATCCGTATTATTA |
| | CCTTGCTCAAGAGCTTATTCCATCCTATTTTGCGTTG |
| | GAAAAACAAGTTTATCCGGAGGGTGGGCACGTTGTA |
| | CGCTTTGACTCATTTAGTAAATTGCTTTCTGCTGGGA |
| | TGCGCTTGGGATTTGCTACAGGGCCGAAGGAAATTC |
| | TTCATGCGATTGACGTCAGTACAGCAGGCGCAAATT |
| | TACATACTTCAGCGGTCTCTCAAGGTGTCGCTCTTCG |
| | CCTGATGCAGTATTGGGGGATCGAGGGATTCCTTGC |
| | ACATGGCCGCGCGGTGGCCAAACTTTACACGGAGCG |
| | CCGCGCTCAGTTCGAGGCAACCGCACATAAGTACCT |
| | GGACGGGCTGGCCACTTGGGTATCTCCCGTAGCGGG |
| | AATGTTTTTATGGATCGATCTTCGTCCAGCAGGAATC |
| | GAAGATTCTTACGAATTAATTCGCCATGAAGCATTA |
| | GCCAAAGGCGTTTTAGGCGTTCCAGGGATGGCGTTTT |
| | ATCCGACAGGCCGTAAGTCTTCCCATGTTCGTGTCAG |
| | TTTCAGTATCGTCGACCTGGAAGACGAATCTGACCTT |
| | GGTTTTCAACGCCTGGCTGAAGCTATTAAGGATAAA |
| | CGCAAGGCTTTAGGGCTGGCT |
| Tryptophan | ATGAGTCAAGTGATTAAGAAGAAACGTAACACCTTT |
| Decarboxylase (EC | ATGATCGGAACGGAGTACATTCTTAACAGTACACAA |
| 4.1.1.28) Chain A, | TTGGAGGAAGCGATTAAATCATTCGTACATGATTTCT |
| Ruminococcus | GCGCAGAGAAGCATGAGATCCATGATCAACCTGTGG |
| Gnavus Tryptophan | TAGTAGAAGCTAAAGAACATCAGGAGGACAAAATC |
| Decarboxylase Rum | AAACAAATCAAAATCCCGGAAAAGGGACGTCCTGTA |
| gna_01526 (alpha- | AATGAAGTCGTTTCTGAGATGATGAATGAAGTGTAT |
| fmt); codon | CGCTACCGCGGAGACGCCAACCATCCTCGCTTTTTTT |
| optimized for the | CTTTTGTGCCCGGACCTGCAAGGAGTGTGTCGTGGTT |
| expression in E. coli | GGGGGATATTATGACGTCCGCCTACAATATrCATGCT |
| | GGAGGCTCAAAGCTGGCACCGATGGTTAACTGCATT |
| | GAGCAGGAAGTTCTGAAGTGGTTAGCAAAGGAAGTG |
| | GGGTTCACAGAAAATCCAGGTGGCGTATTTGTGTCG |
| | GGCGGTTCAATGGCGAATATTACGGCACTTACTGCG |
| | GCTCGTGACAATAAACTGACCGACATTAACCTTCATT |
| | TGGGAACTGCTTATATTAGTGACCAGACTCATAGTTC |
| | AGTTGCGAAAGGATTACGCATTATTGGAATCACTGA |
| | CAGTCGCATCCGTCGCATTCCCACTAACTCCCACTTC |
| | CAGATGGATACCACCAAGCTGGAGGAAGCCATCGAG |
| | ACCGACAAGAAGTCTGGCTACATTCCGTTCGTCGTTA |
| | TCGGAACAGCAGGTACCACCAACACTGGTTCGATTG |
| | ACCCCCTGACAGAAATCTCTGCGTTATGTAAGAAGC |
| | ATGACATGTGGTTTCATATCGACGGAGCGTATGGAG |
| | CTAGTGTTCTGCTGTCACCTAAGTACAAGAGCCTTCT |
| | TACCGGAACCGGCTTGGCTGACAGTATTTCGTGGGA |
| | TGCTCATAAATGGTTGTTCCAAACGTACGGCTGTGCA |
| | ATGGTACTTGTCAAAGATATCCGTAATTTATTCCACT |
| | CTTTTCATGTGAATCCCGAGTATCTTAAGGATCTGGA |
| | AAACGACATCGATAACGTTAATACATGGGACATCGG |
| | CATGGAGCTGACGCGCCCTGCACGCGGTCTTAAATT |
| | GTGGCTTACTTTACAGGTCCTTGGATCTGACTTGATT |
| | GGGAGTGCCATTGAACACGGTTTCCAGCTGGCAGTT |
| | TGGGCTGAGGAACCATTGAATCCAAAGAAAGACTGG |
| | GAGATCGTTTCTCCAGCTCAGATGGCTATGATTAATT |
| | TCCGTTATGCCCCTAAGGATTTAACCAAAGAGGAAC |
| | AGGATATTCTGAATGAAAAGATCTCCCACCGCATTTT |
| | AGAGAGCGGATACGCTGCAATTTTCACTACTGTATTA |
| | AACGGCAAGACCGTTTTACGCATCTGTGCAATTCACC |
| | CGGAGGCAACTCAAGAGGATATGCAACACAATCG |
| | ACTTATTAGACCAATACGGTCGTGAAATCTATACCG |
| | AGATGAAGAAAGCG |

[0579] In some embodiments, the genetically engineered bacteria comprise one or more nucleic acid sequence of Table 16B or a functional fragment thereof. In some embodiments, the genetically engineered bacteria comprise a nucleic acid sequence that, but for the redundancy of the genetic code, encodes the same polypeptide as listed in Table 16A or a functional fragment thereof. In some embodiments, genetically engineered bacteria comprise a nucleic acid sequence that is at least about 80%, at least about 85%, at least about 90%, at least about 95%, or at least about 99% homologous to the DNA sequence of one or more nucleic acid sequence of Table 16B or a functional fragment thereof, or a nucleic acid sequence that, but for the redundancy of the genetic code, encodes the same polypeptide the polypeptide sequences listed in Table 16A or a functional fragment thereof.

[0580] In one embodiment, the Tryptophan Decarboxylase gene encodes a polypeptide which has at least about 80% identity with the entire sequence of SEQ ID NO: 141. In another embodiment, the Tryptophan Decarboxylase gene encodes a polypeptide which has at least about 85% identity with the entire sequence of SEQ ID NO: 141. In one embodiment, the Tryptophan Decarboxylase gene encodes a polypeptide which has at least about 90% identity with the entire sequence of SEQ ID NO: 141. In one embodiment, the Tryptophan Decarboxylase gene encodes a polypeptide which has at least about 95% identity with the entire sequence of SEQ ID NO: 141. In another embodiment, the Tryptophan Decarboxylase gene encodes a polypeptide which has at least about 96%, 97%, 98%, or 99% identity with the entire sequence of SEQ ID NO: 141. Accordingly, in one embodiment, the Tryptophan Decarboxylase gene encodes a polypeptide which has at least about 80%, 81%, 82%, 83%, 84%, 85%, 86%, 87%, 88%, 89%, 90%, 91%, 92%, 93%, 94%, 95%, 96%, 97%, 98%, or 99% identity with the entire sequence of SEQ ID NO: 141. In another embodiment, the Tryptophan Decarboxylase gene encodes a polypeptide which comprises the sequence of SEQ ID NO: 141. In yet another embodiment the Tryptophan Decarboxylase gene encodes a polypeptide which consists of the sequence of SEQ ID NO: 141.

[0581] In one embodiment, the Indole-3-pyruvate decarboxylase gene encodes a polypeptide which has at least about 80% identity with the entire sequence of SEQ ID NO: 149. In another embodiment, the Indole-3-pyruvate decarboxylase gene encodes a polypeptide which has at least about 85% identity with the entire sequence of SEQ ID NO: 149. In one embodiment, the Indole-3-pyruvate decarboxylase gene encodes a polypeptide which has at least about 90% identity with the entire sequence of SEQ ID NO: 149. In one embodiment, the Indole-3-pyruvate decarboxylase gene encodes a polypeptide which has at least about 95% identity with the entire sequence of SEQ ID NO: 149. In another embodiment, the Indole-3-pyruvate decarboxylase gene encodes a polypeptide which has at least about 96%, 97%, 98%, or 99% identity with the entire sequence of SEQ ID NO: 149. Accordingly, in one embodiment, the Indole-3-pyruvate decarboxylase gene encodes a polypeptide which has at least about 80%, 81%, 82%, 83%, 84%, 85%, 86%, 87%, 88%, 89%, 90%, 91%, 92%, 93%, 94%, 95%, 96%, 97%, 98%, or 99% identity with the entire sequence of SEQ ID NO: 149. In another embodiment, the Indole-3-pyruvate decarboxylase gene encodes a polypeptide which comprises the sequence of SEQ ID NO: 149. In yet another embodiment the Indole-3-pyruvate decarboxylase gene encodes a polypeptide which consists of the sequence of SEQ ID NO: 149.

[0582] In one embodiment, the Indole-3-acetaldehyde dehydrogenase gene encodes a polypeptide which has at least about 80% identity with the entire sequence of SEQ ID NO: 150. In another embodiment, the Indole-3-acetaldehyde dehydrogenase gene encodes a polypeptide which has at least about 85% identity with the entire sequence of SEQ ID NO: 150. In one embodiment, the Indole-3-acetaldehyde dehydrogenase gene encodes a polypeptide which has at least about 90% identity with the entire sequence of SEQ ID NO: 150. In one embodiment, the Indole-3-acetaldehyde dehydrogenase gene encodes a polypeptide which has at least about 95% identity with the entire sequence of SEQ ID NO: 150. In another embodiment, the Indole-3-acetaldehyde dehydrogenase gene encodes a polypeptide which has at least about 96%, 97%, 98%, or 99% identity with the entire sequence of SEQ ID NO: 150. Accordingly, in one embodiment, the Indole-3-acetaldehyde dehydrogenase gene encodes a polypeptide which has at least about 80%, 81%, 82%, 83%, 84%, 85%, 86%, 87%, 88%, 89%, 90%, 91%, 92%, 93%, 94%, 95%, 96%, 97%, 98%, or 99% identity with the entire sequence of SEQ ID NO: 150. In another embodiment, the Indole-3-acetaldehyde dehydrogenase gene encodes a polypeptide which comprises the sequence of SEQ ID NO: 150. In yet another embodiment the Indole-3-acetaldehyde dehydrogenase gene encodes a polypeptide which consists of the sequence of SEQ ID NO: 150.

[0583] In one embodiment, the Indole-3-acetaldehyde dehydrogenase gene encodes a polypeptide which has at least about 80% identity with the entire sequence of SEQ ID NO: 154. In another embodiment, the Indole-3-acetaldehyde dehydrogenase gene encodes a polypeptide which has at least about 85% identity with the entire sequence of SEQ ID NO: 154. In one embodiment, the Indole-3-acetaldehyde dehydrogenase gene encodes a polypeptide which has at least about 90% identity with the entire sequence of SEQ ID NO: 154. In one embodiment, the Indole-3-acetaldehyde dehydrogenase gene encodes a polypeptide which has at least about 95% identity with the entire sequence of SEQ ID NO: 154. In another embodiment, the Indole-3-acetaldehyde dehydrogenase gene encodes a polypeptide which has at least about 96%, 97%, 98%, or 99% identity with the entire sequence of SEQ ID NO: 154. Accordingly, in one embodiment, the Indole-3-acetaldehyde dehydrogenase gene encodes a polypeptide which has at least about 80%, 81%, 82%, 83%, 84%, 85%, 86%, 87%, 88%, 89%, 90%, 91%, 92%, 93%, 94%, 95%, 96%, 97%, 98%, or 99% identity with the entire sequence of SEQ ID NO: 154. In another embodiment, the Indole-3-acetaldehyde dehydrogenase gene encodes a polypeptide which comprises the sequence of SEQ ID NO: 154. In yet another embodiment the Indole-3-acetaldehyde dehydrogenase gene encodes a polypeptide which consists of the sequence of SEQ ID NO: 154.

[0584] In one embodiment, genetically engineered bacteria comprise one or more gene sequence(s) which encode one or more polypeptide(s) which has at least about 80% identity with the entire sequence of one or more sequence(s) of Table 16A. In another embodiment, the one or more gene sequence(s) which encode one or more polypeptide(s) which has at least about 85% identity with the entire sequence of one or more sequence(s) of Table 16A. In one embodiment, the one or more gene sequence(s) which encode one or more polypeptide(s) which has at least about 90% identity with the entire sequence of one or more sequence(s) of Table 16A. In one embodiment, the one or more gene sequence(s) which encode one or more polypeptide(s) which has at least about 95% identity with the entire sequence of one or more sequence(s) of Table 16A. In another embodiment, the one or more gene sequence(s) which encode one or more polypeptide(s) which has at least about 96%, 97%, 98%, or 99%identity with the entire sequence of one or more sequence(s) of Table 16A. Accordingly, in one embodiment, the one or more gene sequence(s) which encode one or more polypeptide(s) which has at least about 80%, 81%, 82%, 83%, 84%, 85%, 86%, 87%, 88%, 89%, 90%, 91%, 92%, 93%, 94%, 95%, 96%, 97%, 98%, or 99% identity with the entire sequence of one or more sequence(s) of Table 16A. In another embodiment, the one or more gene sequence(s) which encode one or more polypeptide(s) which comprises the entire sequence of one or more sequence(s) of Table 16A.

[0585] In some embodiments, the genetically engineered bacteria comprise a gene cassette for the production of tryptamine from tryptophan. In some embodiments, the genetically engineered bacteria take up tryptophan through an endogenous or exogenous transporter as described above herein. In som embodiments the bacteria further produce tryptamine from tryptophan. In some embodiments, the genetically engineered bacteria optionally comprise a tryptamine exporter. In some embodiments, the genetically engineered bacteria comprise an exporter of one or more indole metabolites, in order to increase the export of indole metabolites produced.

[0586] Table 17 depicts non-limiting examples of contemplated polypeptide sequences, which are encoded by indole-3-propionate producing bacteria.

TABLE 17
Non-limiting Examples of Sequences for indole-3-propionate Production

| Description | Sequence |
|---|---|
| FldA: indole-3- | MENNTNMFSGVKVIELANFIAAPAAGRFFADGGAEVIKIESPA |
| propionyl- | GDPLRYTAPSEGRPLSQEENTTYDLENANKKAIVLNLKSEKGK |
| CoA: indole-3- | KILHEMLAEADILLTNWRTKALVKQGLDYETLKEKYPKLVFA |
| lactate CoA | QITGYGEKGPDKDLPGFDYTAFFARGGVSGTLYEKGTVPPNV |
| transferase from | VPGLGDHQAGMFLAAGMAGALYKAKTTGQGDKVTVSLMHS |
| Clostridium | AMYGLGIMIQAAQYKDHGLVYPINRNETPNPFIVSYKSKDDYF |
| sporogenes | VQVCMPPYDVFYDRFMTALGREDLVGDERYNKIENLKDGRA |
| SEQ ID NO: 173 | KEVYSIIEQQMVTKTKDEWDKIFRDADIPFAIAQTWEDLLEDE |
| | QAWANDYLYKMKYPTGNERALVRLPVFFKEAGLPEYNQSPQI |
| | AENTVEVLKEMGYTEQEIEELEKDKDIMVRKEK |
| FldB: subunit of | MSDRNKEVKEKKAKHYLREITAKHYKEALEAKERGEKVGWC |
| indole-3-lactate | ASNFPQEIATTLGVKVVYPENHAAAVAARGNGQNMCEHAEA |
| dehydratase from | MGFSNDVCGYARVNLAVMDIGHSEDQPIPMPDFVLCCNNICN |
| Clostridium | QMIKWYEHIAKTLDIPMILIDIPYNTENTVSQDRIKYIRAQFDD |
| sporogenes | AIKQLEEITGKKWDENKFEEVMKISQESAKQWLRAASYAKYK |
| SEQ ID NO: 174 | PSPFSGFDLFNHMAVAVCARGTQEAADAFKMLADEYEENVKT |
| | GKSTYRGEEKQRILFEGIACWPYLRHKLTKLSEYGMNVTATV |
| | YAEAFGVIYENMDELMAAYNKVPNSISFENALKMRLNAVTST |
| | NTEGAVIHINRSCKLWSGFLYELARRLEKETGIPVVSFDGDQA |
| | DPRNFSEAQYDTRIQGLNEVMVAKKEAE |
| FldC: subunit of | MSNSDKFFNDFKDIVENPKKYIMKHMEQTGQKAIGCMPLYTP |
| indole-3-lactate | EELVLAAGMFPVGVWGSNTELSKAKTYFPAFICSILQTTLENA |
| dehydratase from | LNGEYDMLSGMMITNYCDSLKCMGQNFKLTVENIEFIPVTVPQ |
| Clostridium | NRKMEAGKEFLKSQYKMNIEQLEKISGNKITDESLEKAIEIYDE |
| sporogenes | HRKVMNDFSMLASKYPGIITPTKRNYVMKSAYYMDKKEHTE |
| SEQ ID NO: 175 | KVRQLMDEIKAIEPKPFEGKRVITTGIIADSEDLLKILEENNIAIV |
| | GDDIAHESRQYRTLTPEANTPMDRLAEQFANRECSTLYDPEKK |
| | RGQYIVEMAKERKADGIIFFMTKFCDPEEYDYPQMKKDFEEA |
| | GIPHVLIETDMQMKNYEQARTAIQAFSETL |
| FldD: indole-3- | MFFTEQHELIRKLARDFAEQEIEPIADEVDKTAEFPKEIVKKMA |
| acrylyl-CoA | QNGFFGIKMPKEYGGAGADNRAYVTIMEEISRASGVAGIYLSS |
| reductase from | PNSLLGTPFLLVGTDEQKEKYLKPMIRGEKTLAFALTEPGAGS |
| Clostridium | DAGALATTAREEGDYYILNGRKTFITGAPISDNIIVFAKTDMSK |
| sporogenes | GTKGITTFIVDSKQEGVSFGKPEDKMGMIGCPTSDIILENVKVH |
| SEQ ID NO: 176 | KSDILGEVNKGFITAMKTLSVGRIGVASQALGIAQAAVDEAVK |
| | YAKQRKQFNRPIAKFQAIQFKLANMETKLNAAKLLVYNAAYK |
| | MDCGEKADKEASMAKYFAAESAIQIVNDALQIHGGYGYIKDY |
| | KIERLYRDVRVIAIYEGTSEVQQMVIASNLLK |
| FldH1: indole-3- | MKILAYCVRPDEVDSFKKFSEKYGHTVDLIPDSFGPNVAHLAK |
| lactate | GYDGISILGNDTCNREALEKIKDCGIKYLATRTAGVNNIDFDA |
| dehydrogenase | AKEFGINVANVPAYSPNSVSEFTIGLALSLTRKIPFALKRVELN |
| from Clostridium | NFALGGLIGVELRNLTLGVIGTGRIGLKVIEGFSGFGMKKMIGY |
| sporogenes | DIFENEEAKKYIEYKSLDEVFKEADIITLHAPLTDDNYHMIGKE |
| SEQ ID NO: 177 | SIAKMKDGVFIINAARGALIDSEALIEGLKSGKIAGAALDSYEY |
| | EQGVFHNNKMNEIMQDDTLERLKSFPNVVITPHLGFYTDEAVS |
| | NMVEITLMNLQEFELKGTCKNQRVCK |
| FldH2: indole-3- | MKILMYSVREHEKPAIKKWLEANPGVQIDLCNNALSEDTVCK |
| lactate | AKEYDGIAIQQTNSIGGKAVYSTLKEYGIKQIASRTAGVDMIDL |
| dehydrogenase | KMASDSNILVTNVPAYSPNAIAELAVTHTMNLLRNIKTLNKRI |
| from Clostridium | AYGDYRWSADLIAREVRSVTVGVVGTGKIGRTSAKLFKGLGA |
| sporogenes | NVIGYDAYPDKKLEENNLLTYKESLEDLLREADVVTLHTPLLE |
| SEQ ID NO: 178 | STKYMINKNNLKYMKPDAFIVNTGRGGIINTEDLIEALEQNKIA |
| | GAALDTFENEGLFLNKVVDPTKLPDSQLDKLLKMDQVLITHH |
| | VGFFTTTAVQNIVDTSLDSVVEVLKTNNSVNKVN |
| AcuI: acrylyl- | MRAVLIEKSDDTQSVSVTELAEDQLPEGDVLVDVAYSTLNYK |
| CoA reductase | DALAITGKAPVVRRFPMVPGIDFTGTVAQSSHADFKPGDRVIL |
| from Rhodobacter | NGWGVGEKHWGGLAERARVRGDWLVPLPAPLDLRQAAMIG |
| sphaeroides | TAGYTAMLCVLALERHGVVPGNGEIVVSGAAGGVGSVATTLL |
| SEQ ID NO: 179 | AAKGYEVAAVTGRASEAEYLRGLGAASVIDRNELTGKVRPLG |
| | QERWAGGIDVAGSTVLANMLSMMKYRGVVAACGLAAGMDL |
| | PASVAPFILRGMTLAGVDSVMCPKTDRLAAWARLASDLDPAK |
| | LEEMTTELPFSEVIETAPKFLDGTVRGRIVIPVTP |

[0587] In one embodiment, the tryptophan pathway catabolic enzyme encoded by the genetically engineered bacteria has at least about 80% identity with the entire sequence of one or more of SEQ ID NO: 173 through SEQ ID NO: 179. In another embodiment, the tryptophan pathway catabolic enzyme has at least about 85% identity with the entire sequence of one or more SEQ ID NO: 173 through SEQ ID NO: 179. In one embodiment, the tryptophan pathway catabolic enzyme has at least about 90% identity with the entire sequence of one or more SEQ ID NO: 173 through SEQ ID NO: 179. In one embodiment, the tryptophan pathway catabolic enzyme has at least about 95% identity with the entire sequence of one or more SEQ ID NO: 173 through SEQ ID NO: 179. In another embodiment, the tryptophan pathway catabolic enzyme has at least about 96%, 97%, 98%, or 99% identity with the entire sequence of one or more SEQ ID NO: 173 through SEQ ID NO: 179. Accordingly, in one embodiment, the tryptophan pathway catabolic enzyme has at least about 80%, 81%, 82%, 83%, 84%, 85%, 86%, 87%, 88%, 89%, 90%, 91%, 92%, 93%, 94%, 95%, 96%, 97%, 98%, or 99% identity with the entire sequence of one or more SEQ ID NO: 173 through SEQ ID NO: 179. In another embodiment, the tryptophan pathway catabolic enzyme comprises the sequence of one or more SEQ ID NO: 173 through SEQ ID NO: 179. In yet another embodiment the tryptophan pathway catabolic enzyme consists of the sequence of one or more SEQ ID NO: 173 through SEQ ID NO: 179.

[0588] In some embodiments, the genetically engineered bacteria comprise a gene cassette for the production of one or more indole pathway metabolites described herein from tryptophan or a tryptophan metabolite. In some embodiments, the genetically engineered bacteria take up tryptophan through an endogenous or exogenous transporter as described above herein. In some embodiments, the genetically engineered bacteria additionally produce tryptophan and/or chorismate through any of the pathways described herein, e.g. FIG. 39, FIG. 45A and FIG. 45B. In some embodiments, the genetically engineered bacteria comprise an exporter of one or more indole metabolites, in order to increase the export of indole metabolites produced.

[0589] In some embodiments, the genetically engineered bacteria are capable of expressing any one or more of the described circuits in low-oxygen conditions, in the presence of disease or tissue specific molecules or metabolites, in the presence of molecules or metabolites associated with inflammation or an inflammatory response or immune suppression or in the presence of some other metabolite that may or may not be present in the gut, such as arabinose or tetracycline. In some embodiments, any one or more of the described circuits are present on one or more plasmids (e.g., high copy or low copy) or are integrated into one or more sites in the bacterial chromosome. In some embodiments, the tryptophan synthesis and/or tryptophan catabolism cassette(s) is under control of an inducible promoter. Exemplary inducible promoters which may control the expression of the al teast one sequence(s) include oxygen level-dependent promoters (e.g., FNR-inducible promoter), promoters induced by inflammation or an inflammatory response (RNS, ROS promoters), and promoters induced by a metabolite that may or may not be naturally present (e.g., can be exogenously added) in the gut, e.g., arabinose and tetracycline.

[0590] Also, in some embodiments, the genetically engineered bacteria are further capable of expressing any one or more of the described circuits and further comprise one or more of the following: (1) one or more auxotrophies, such as any auxotrophies known in the art and provided herein, e.g., thyA auxotrophy, (2) one or more kill switch circuits, such as any of the kill-switches described herein or otherwise known in the art, (3) one or more antibiotic resistance circuits, (4) one or more transporters for importing biological molecules or substrates, such any of the transporters described herein or otherwise known in the art, (5) one or more exporters for exporting biological molecules or substrates, such any of the exporters described herein or otherwise known in the art, (6) one or more secretion circuits, such as any of the secretion circuits described herein and otherwise known in the art, and (7) combinations of one or more of such additional circuits.

### Tryptophan Repressor (TrpR)

[0591] In any of these embodiments, the tryptophan repressor (trpR) optionally may be deleted, mutated, or modified so as to diminish or obliterate its repressor function. Also, in any of these embodiments, the genetically engineered bacteria optionally comprise gene sequence(s) to produce the tryptophan precursor, Chorismate, e.g., sequence(s) encoding aroG, aroF, aroH, aroB, aroD, aroE, aroK, and AroC.

[0592] In some embodiments, the gene sequences(s) are controlled by an inducible promoter. In some embodiments, the gene sequences(s) are controlled by a constitutive promoter. In some embodiments, the gene sequences(s) are controlled by an inducible and/or constritutive promoter, and are expressed during bacterial culture in vitro, e.g., for bacterial expansion, production and/or manufacture, as described herein.

### Tryptophan and Tryptophan MetaboliteTransport

[0593] Metabolite transporters may further be expressed or modified in the genetically engineered bacteria of the invention in order to enhance tryptophan or KP metabolite transport into the cell.

[0594] The inner membrane protein YddG of E. coli , encoded by the yddG gene, is a homologue of the known amino acid exporters RhtA and YdeD. Studies have shown that YddG is capable of exporting aromatic amino acids, including tryptophan. Thus, YddG can function as a tryptophan exporter or a tryptophan secretion system (or tryptophan secretion protein). Other aromatic amino acid exporters are described in Doroshenko et al., FEMS Microbiol. Lett., 275:312-318 (2007). Thus, in some embodiments, the engineered bacteria optionally further comprise gene sequence(s) encoding YddG. In some embodiments, the engineered bacteria can over-express YddG. In some embodiments, the engineered bacteria optionally comprise one or more copies of yddG gene.

[0595] In some embodiments, the engineered microbe has a mechanism for importing (transporting) Kynurenine from the local environment into the cell. Thus, in some embodiments, the genetically engineered bacteria comprise gene sequence(s) encoding a kynureninase secreter. In some embodiments, the genetically engineered bacteria comprise one or more copies of aroP, tnaB or mtr gene.

[0596] In some embodiments, the genetically engineered bacteria comprise a transporter to facilitate uptake of tryptophan into the cell. Three permeases, Mtr, TnaB, and AroP, are involved in the uptake of L-tryptophan in Escherichia coli. In some embodiments, the genetically engineered bacteria comprise one or more copies of one or more of Mtr, TnaB, and AroP.

[0597] In some embodiments, the genetically engineered bacteria of the invention also comprise multiple copies of the transporter gene. In some embodiments, the genetically engineered bacteria of the invention also comprise a transporte gene from a different bacterial species. In some embodiments, the genetically engineered bacteria of the invention comprise multiple copies of a transporter gene from a different bacterial species. In some embodiments, the native transporter gene in the genetically engineered bacteria of the invention is not modified. In some embodiments, the genetically engineered bacteria of the invention comprise a transporter gene that is controlled by its native promoter, an inducible promoter, or a promoter that is stronger than the native promoter, e.g., a GlnRS promoter, a P(Bla) promoter, or a constitutive promoter.

[0598] In some embodiments, the gene sequences(s) are controlled by an inducible promoter. In some embodiments, the gene sequences(s) are controlled by a constitutive promoter. In some embodiments, the gene sequences(s) are controlled by an inducible and/or constritutive promoter, and are expressed during bacterial culture in vitro, e.g., for bacterial expansion, production and/or manufacture, as described herein.

[0599] In some embodiments, the native transporter gene in the genetically engineered bacteria is not modified, and one or more additional copies of the native transporter gene are inserted into the genome under the control of the same inducible promoter that controls expression of the payload, e.g., a FNR promoter, or a different inducible promoter than the one that controls expression of the payload or a constitutive promoter. In alternate embodiments, the native transporter gene is not modified, and a copy of a non-native transporter gene from a different bacterial species is inserted into the genome under the control of the same inducible promoter that controls expression of the payload, e.g., a FNR promoter, or a different inducible promoter than the one that controls expression of the payload or a constitutive promoter.

[0600] In some embodiments, the native transporter gene in the genetically engineered bacteria is not modified, and one or more additional copies of the native transporter gene are present in the bacteria on a plasmid and under the control of the same inducible promoter that controls expression of the payload e.g., a FNR promoter, or a different inducible promoter than the one that controls expression of the payload or a constitutive promoter. In alternate embodiments, the native transporter gene is not modified, and a copy of a non-native transporter gene from a different bacterial species is present in the bacteria on a plasmid and under the control of the same inducible promoter that controls expression of the payload , e.g., a FNR promoter, or a different inducible promoter than the one that controls expression of the payload or a constitutive promoter.

[0601] In some embodiments, the native transporter gene is mutagenized, the mutants exhibiting increased ammonia transport are selected, and the mutagenized transporter gene is isolated and inserted into the genetically engineered bacteria. In some embodiments, the native transporter gene is mutagenized, mutants exhibiting increased ammonia transport are selected, and those mutants are used to produce the bacteria of the invention. The transporter modifications described herein may be present on a plasmid or chromosome.

[0602] In some embodiments, the genetically engineered bacterium is E. coli Nissle, and the native transporter gene in E. coli Nissle is not modified; one or more additional copies the native E. coli Nissle transporter genes are inserted into the E. coli Nissle genome under the control of the same inducible promoter that controls expression of the payload e.g., a FNR promoter, or a different inducible promoter than the one that controls expression of the payload or a constitutive promoter. In an alternate embodiment, the native transporter gene in E. coli Nissle is not modified, and a copy of a non-native transporter gene from a different bacterium, e.g., Lactobacillus plantarum, is inserted into the E. coli Nissle genome under the control of the same inducible promoter that controls expression of the payload, e.g., a FNR promoter, or a different inducible promoter than the one that controls expression of the payload or a constitutive promoter.

[0603] In some embodiments, the genetically engineered bacterium is E. coli Nissle, and the native transporter gene in E. coli Nissle is not modified; one or more additional copies the native E. coli Nissle transporter genes are present in the bacterium on a plasmid and under the control of the same inducible promoter that controls expression of the payload, e.g., a FNR promoter, or a different inducible promoter than the one that controls expression of the payload, or a constitutive promoter. In an alternate embodiment, the native transporter gene in E. coli Nissle is not modified, and a copy of a non-native transporter gene from a different bacterium, e.g., Lactobacillus plantarum, are present in the bacterium on a plasmid and under the control of the same inducible promoter that controls expression of the payload, e.g., a FNR promoter, or a different inducible promoter than the one that controls expression of the payload, or a constitutive promoter.

### Inhibitory and Targeting Molecules

[0604] In some embodiments, the genetically engineered bacteria of the invention are capable of producing a molecule that is capable of inhibiting a metabolic disease-promoting molecule. The genetically engineered bacteria may express any suitable inhibitory molecule, e.g., a single-chain variable fragment (scFv), antisense RNA, siRNA, or shRNA, that is capable of neutralizing one or more metabolic disease-promoting molecules, e.g., dipeptidyl peptidase-4 (DPP-4) or ghrelin receptor. The genetically engineered bacteria may inhibit one or more metabolic disease-promoting molecules.

[0605] RNA interference (RNAi) is a post-transcriptional gene silencing mechanism in plants and animals. RNAi is activated when microRNA (miRNA), double-stranded RNA (dsRNA), or short hairpin RNA (shRNA) is processed into short interfering RNA (siRNA) duplexes (Keates et al., 2008). RNAi can be “activated in vitro and in vivo by non-pathogenic bacteria engineered to manufacture and deliver shRNA to target cells” such as mammalian cells (Keates et al., 2008). In some embodiments, the genetically engineered bacteria of the invention induce RNAi-mediated gene silencing of one or more metabolic disease-promoting molecules in low-oxygen conditions, in the presence of certain molecules or metabolites, in the presence of molecules or metabolites associated with liver damage, metabolic disease, inflammation or an inflammatory response, or in the presence of some other metabolite that may or may not be present in the gut, such as arabinose.In some embodiments, the genetically engineered bacteria produce siRNA targeting DPP-4 in low-oxygen conditions, in the presence of certain molecules or metabolites, in the presence of molecules or metabolites associated with liver damage, metabolic disease, inflammation or an inflammatory response, or in the presence of some other metabolite that may or may not be present in the gut, such as arabinose.

[0606] Single-chain variable fragments (scFv) are “widely used antibody fragments . . . produced in prokaryotes” (Frenzel et al., 2013). scFv lacks the constant domain of a traditional antibody and expresses the antigen-binding domain as a single peptide. Bacteria such as Escherichia coli are capable of producing scFv that target a variety of molecules, e.g., TNF (Hristodorov et al., 2014). In some embodiments, the genetically engineered bacteria of the invention express a binding protein for neutralizing one or more metabolic disease-promoting molecules in low-oxygen conditions, in the presence of certain molecules or metabolites, in the presence of molecules or metabolites associated with liver damage, metabolic disease, inflammation or an inflammatory response, or in the presence of some other metabolite that may or may not be present in the gut, such as arabinose. In some embodiments, the genetically engineered bacteria produce scFv targeting DPP-4 in low-oxygen conditions, in the presence of certain molecules or metabolites, in the presence of molecules or metabolites associated with liver damage, metabolic disease, inflammation or an inflammatory response, or in the presence of some other metabolite that may or may not be present in the gut, such as arabinose. In some embodiments, the genetically engineered bacteria produce both scFv and siRNA targeting one or more metabolic disease-promoting molecules in low-oxygen conditions, in the presence of certain molecules or metabolites, in the presence of molecules or metabolites associated with liver damage, metabolic disease, inflammation or an inflammatory response, or in the presence of some other metabolite that may or may not be present in the gut, such as arabinose (see, e.g., Xiao et al., 2014).

[0607] In some embodiments, the gene sequences(s) are controlled by an inducible promoter. In some embodiments, the gene sequences(s) are controlled by a constitutive promoter. In some embodiments, the gene sequences(s) are controlled by an inducible and/or constritutive promoter, and are expressed during bacterial culture in vitro, e.g., for bacterial expansion, production and/or manufacture, as described herein.

[0608] Generation of Bacterial Strains with Enhanced Ability to Transport Amino Acids

[0609] Due to their ease of culture, short generation times, very high population densities and small genomes, microbes can be evolved to unique phenotypes in abbreviated timescales. Adaptive laboratory evolution (ALE) is the process of passaging microbes under selective pressure to evolve a strain with a preferred phenotype. Most commonly, this is applied to increase utilization of carbon/energy sources or adapting a strain to environmental stresses (e.g., temperature, pH), whereby mutant strains more capable of growth on the carbon substrate or under stress will outcompete the less adapted strains in the population and will eventually come to dominate the population.

[0610] This same process can be extended to any essential metabolite by creating an auxotroph. An auxotroph is a strain incapable of synthesizing an essential metabolite and must therefore have the metabolite provided in the media to grow. In this scenario, by making an auxotroph and passaging it on decreasing amounts of the metabolite, the resulting dominant strains should be more capable of obtaining and incorporating this essential metabolite.

[0611] For example, if the biosynthetic pathway for producing an amino acid is disrupted a strain capable of high-affinity capture of said amino acid can be evolved via ALE. First, the strain is grown in varying concentrations of the auxotrophic amino acid, until a minimum concentration to support growth is established. The strain is then passaged at that concentration, and diluted into lowering concentrations of the amino acid at regular intervals. Over time, cells that are most competitive for the amino acid—at growth-limiting concentrations—will come to dominate the population. These strains will likely have mutations in their amino acid-transporters resulting in increased ability to import the essential and limiting amino acid.

[0612] Similarly, by using an auxotroph that cannot use an upstream metabolite to form an amino acid, a strain can be evolved that not only can more efficiently import the upstream metabolite, but also convert the metabolite into the essential downstream metabolite. These strains will also evolve mutations to increase import of the upstream metabolite, but may also contain mutations which increase expression or reaction kinetics of downstream enzymes, or that reduce competitive substrate utilization pathways.

[0613] A metabolite innate to the microbe can be made essential via mutational auxotrophy and selection applied with growth-limiting supplementation of the endogenous metabolite. However, phenotypes capable of consuming non-native compounds can be evolved by tying their consumption to the production of an essential compound. For example, if a gene from a different organism is isolated which can produce an essential compound or a precursor to an essential compound this gene can be recombinantly introduced and expressed in the heterologous host. This new host strain will now have the ability to synthesize an essential nutrient from a previously non-metabolizable substrate.

[0614] Hereby, a similar ALE process can be applied by creating an auxotroph incapable of converting an immediately downstream metabolite and selecting in growth-limiting amounts of the non-native compound with concurrent expression of the recombinant enzyme. This will result in mutations in the transport of the non-native substrate, expression and activity of the heterologous enzyme and expression and activity of downstream native enzymes. It should be emphasized that the key requirement in this process is the ability to tether the consumption of the non-native metabolite to the production of a metabolite essential to growth.

[0615] Once the basis of the selection mechanism is established and minimum levels of supplementation have been established, the actual ALE experimentation can proceed. Throughout this process several parameters must be vigilantly monitored. It is important that the cultures are maintained in an exponential growth phase and not allowed to reach saturation/stationary phase. This means that growth rates must be check during each passaging and subsequent dilutions adjusted accordingly. If growth rate improves to such a degree that dilutions become large, then the concentration of auxotrophic supplementation should be decreased such that growth rate is slowed, selection pressure is increased and dilutions are not so severe as to heavily bias subpopulations during passaging. In addition, at regular intervals cells should be diluted, grown on solid media and individual clones tested to confirm growth rate phenotypes observed in the ALE cultures.

[0616] Predicting when to halt the stop the ALE experiment also requires vigilance. As the success of directing evolution is tied directly to the number of mutations “screened” throughout the experiment and mutations are generally a function of errors during DNA replication, the cumulative cell divisions (CCD) acts as a proxy for total mutants which have been screened. Previous studies have shown that beneficial phenotypes for growth on different carbon sources can be isolated in about 1011.2 CCD1. This rate can be accelerated by the addition of chemical mutagens to the cultures—such as N-methyl-N-nitro-N-nitrosoguanidine (NTG)—which causes increased DNA replication errors. However, when continued passaging leads to marginal or no improvement in growth rate the population has converged to some fitness maximum and the ALE experiment can be halted.

[0617] At the conclusion of the ALE experiment, the cells should be diluted, isolated on solid media and assayed for growth phenotypes matching that of the culture flask. Best performers from those selected are then prepped for genomic DNA and sent for whole genome sequencing. Sequencing with reveal mutations occurring around the genome capable of providing improved phenotypes, but will also contain silent mutations (those which provide no benefit but do not detract from desired phenotype). In cultures evolved in the presence of NTG or other chemical mutagen, there will be significantly more silent, background mutations. If satisfied with the best performing strain in its current state, the user can proceed to application with that strain. Otherwise the contributing mutations can be deconvoluted from the evolved strain by reintroducing the mutations to the parent strain by genome engineering techniques. See Lee, D.-H., Feist, A. M., Barrett, C. L. & Palsson, B. Ø. Cumulative Number of Cell Divisions as a Meaningful Timescale for Adaptive Laboratory Evolution of Escherichia coli. PLoS ONE 6, e26172 (2011).

[0618] Similar methods can be used to generate E. Coli Nissle mutants that consume or import tryptophan and/or kynurenine.

[0619] Regulation of Payload Expression

[0620] In some embodiments, the bacterial cell comprises a stably maintained plasmid or chromosome carrying the gene(s) encoding payload (s), such that the payload(s) can be expressed in the host cell, and the host cell is capable of survival and/or growth in vitro, e.g., in medium, and/or in vivo, e.g., in the gut. In some embodiments, bacterial cell comprises two or more distinct payloads or operons, e.g., two or more payload genes. In some embodiments, bacterial cell comprises three or more distinct transporters or operons, e.g., three or more payload genes. In some embodiments, bacterial cell comprises 4, 5, 6, 7, 8, 9, 10, or more distinct payloads or operons, e.g., 4, 5, 6, 7, 8, 9, 10, or more payload genes.

[0621] Herein the term “payload” refers to one or more effector molecules described herein and/or one or more enzyme(s) or polypeptide(s0 needed for the production of such effector molecules. Non-limiting examples of payloads include butyrate, propionate, acetate, and butyrate and/or propionate and/or acetate producing enzymes,. Further examples include GLP-1, GLP-2, manganese transporters, GABA transporters, tryptophan and/pr tryptophan metabolite transporters, aromatic amino acid transporters, and polypeptides for metabolizing (catabolizing) GABA. Yet further examples include tryptophan and/or one or more of its metabolites, e.g., KP metabolites ann/or indole metabolites as described herein, and/or one or more enzyme(s) for the production of tryptophan and/or one or more of its metabolites, and/or one or more gut-barrier enhancing molecule(s) and/or antinflammatory molecules described herein. Yet other examples include bile salt hydrolases, bile salte transporters, and bile salt exporters described herein.

[0622] In some embodiments, the genetically engineered bacteria comprise multiple copies of the same payload gene(s). In some embodiments, the gene encoding the payload is present on a plasmid and operably linked to a directly or indirectly inducible promoter. In some embodiments, the gene encoding the payload is present on a plasmid and operably linked to a constitutive promoter. In some embodiments, the gene encoding the payload is present on a plasmid and operably linked to a promoter that is induced under low-oxygen or anaerobic conditions. In some embodiments, the gene encoding the payload is present on plasmid and operably linked to a promoter that is induced by exposure to tetracycline or arabinose, or another chemical or nutritional inducer described herein.

[0623] In some embodiments, the gene encoding the payload is present on a chromosome and operably linked to a directly or indirectly inducible promoter. In some embodiments, the gene encoding the payload is present on a chromosome and operably linked to a constitutive promoter. In some embodiments, the gene encoding the payload is present in the chromosome and operably linked to a promoter that is induced under low-oxygen or anaerobic conditions. In some embodiments, the gene encoding the payload is present on chromosome and operably linked to a promoter that is induced by exposure to tetracycline or arabinose, or another chemical or nutritional inducer described herein.

[0624] In some embodiments, the promoter is induced under in vivo conditions, e.g., the gut, as described herein. In some embodiments, the promoters is induced under in vitro conditions, e.g., various cell culture and/or cell manufacturing conditions, as described herein. In some embodiments, the promoter is induced under in vivo conditions, e.g., the gut, as described herein, and under in vitro conditions, e.g., various cell culture and/or cell production and/or manufacturing conditions, as described herein.

[0625] In some embodiments, the promoter that is operably linked to the gene encoding the payload is directly induced by exogenous environmental conditions (e.g., in vivo and/or in vitro and/or production/manuafacturing conditions). In some embodiments, the promoter that is operably linked to the gene encoding the payload is indirectly induced by exogenous environmental conditions (e.g., in vivo and/or in vitro and/or production/manuafacturing conditions).

[0626] In some embodiments, the promoter is directly or indirectly induced by exogenous environmental conditions specific to the gut of a mammal. In some embodiments, the promoter is directly or indirectly induced by exogenous environmental conditions specific to the small intestine of a mammal. In some embodiments, the promoter is directly or indirectly induced by low-oxygen or anaerobic conditions such as the environment of the mammalian gut. In some embodiments, the promoter is directly or indirectly induced by molecules or metabolites that are specific to the gut of a mammal. . In some embodiments, the promoter is directly or indirectly induced by a molecule that is co-administered with the bacterial cell.

FNR dependent Regulation

[0627] The genetically engineered bacteria of the invention comprise a gene or gene cassette for producing a metabolic and/or satiety effector and/or immune modulator molecule, wherein the gene or gene cassette is operably linked to a directly or indirectly inducible promoter that is controlled by exogenous environmental condition(s). In some embodiments, the inducible promoter is an oxygen level-dependent promoter and the metabolic and/or satiety effector and/or immune modulator molecule is expressed in low-oxygen, microaerobic, or anaerobic conditions. For example, in low oxygen conditions, the oxygen level-dependent promoter is activated by a corresponding oxygen level-sensing transcription factor, thereby driving production of the metabolic and/or satiety effector and/or immune modulator molecule

[0628] Bacteria have evolved transcription factors that are capable of sensing oxygen levels. Different signaling pathways may be triggered by different oxygen levels and occur with different kinetics. An oxygen level-dependent promoter is a nucleic acid sequence to which one or more oxygen level-sensing transcription factors is capable of binding, wherein the binding and/or activation of the corresponding transcription factor activates downstream gene expression. In one embodiment, the genetically engineered bacteria comprise a gene or gene cassette for producing a payload under the control of an oxygen level-dependent promoter. In a more specific aspect, the genetically engineered bacteria comprise a gene or gene cassette for producing a payload under the control of an oxygen level-dependent promoter that is activated under low-oxygen or anaerobic environments, such as the environment of the mammalian gut.

[0629] In certain embodiments, the bacterial cell comprises a gene encoding a payload expressed under the control of a fumarate and nitrate reductase regulator (FNR) responsive promoter. In E. coli , FNR is a major transcriptional activator that controls the switch from aerobic to anaerobic metabolism (Unden et al., 1997). In the anaerobic state, FNR dimerizes into an active DNA binding protein that activates hundreds of genes responsible for adapting to anaerobic growth. In the aerobic state, FNR is prevented from dimerizing by oxygen and is inactive. FNR responsive promoters include, but are not limited to, the FNR responsive promoters listed in Table 18 and Table 19 below. Underlined sequences are predicted ribosome binding sites, and bolded sequences are restriction sites used for cloning.

TABLE 18
FNR Promoter Sequences

| FNR Responsive | |
|---|---|
| Promoter | Sequence |
| SEQ ID NO: 180 | GTCAGCATAACACCCTGACCTCTCATTAATTGTTCATGCCGGGCGGCA |
| | CTATCGTCGTCCGGCCTTTTCCTCTCTTACTCTGCTACGTACATCTATTT |
| | CTATAAATCCGTTCAATTTGTCTGTTTTTTGCACAAACATGAAATATCA |
| | GACAATTCCGTGACTTAAGAAAATTTATACAAATCAGCAATATACCCC |
| | TTAAGGAGTATATAAAGGTGAATTTGATTTACATCAATAAGCGGGGTT |
| | GCTGAATCGTTAAGGTAGGCGGTAATAGAAAAGAAATCGAGGCAAAA |
| SEQ ID NO: 181 | ATTTCCTCTCATCCCATCCGGGGTGAGAGTCTTTTCCCCCGACTTATGG |
| | CTCATGCATGCATCAAAAAAGATGTGAGCTTGATCAAAAACAAAAAA |
| | TATTTCACTCGACAGGAGTATTTATATTGCGCCCGTTACGTGGGCTTCG |
| | ACTGTAAATCAGAAAGGAGAAAACACCT |
| SEQ ID NO: 182 | GTCAGCATAACACCCTGACCTCTCATTAATTGTTCATGCCGGGCGGCA |
| | CTATCGTCGTCCGGCCTTTTCCTCTCTTACTCTGCTACGTACATCTATTT |
| | CTATAAATCCGTTCAATTTGTCTGTTTTTTGCACAAACATGAAATATCA |
| | GACAATTCCGTGACTTAAGAAAATTTATACAAATCAGCAATATACCCC |
| | TTAAGGAGTATATAAAGGTGAATTTGATTTACATCAATAAGCGGGGTT |
| | GCTGAATCGTTAAGGATCCCTCTAGAAATAATTTTGTTTAACTTTAAG |
| | AAGGAGATATACAT |
| SEQ ID NO: 183 | CATTTCCTCTCATCCCATCCGGGGTGAGAGTCTTTTCCCCCGACTTATG |
| | GCTCATGCATGCATCAAAAAAGATGTGAGCTTGATCAAAAACAAAAA |
| | ATATTTCACTCGACAGGAGTATTTATATTGCGCCCGGATCCCTCTAGA |
| | AATAATTTTGTTTAACTTTAAGAAGGAGATATACAT |
| SEQ ID NO: 184 | AGTTGTTCTTATTGGTGGTGTTGCTTTATGGTTGCATCGTAGTAAATGG |
| | TTGTAACAAAAGCAATTTTTCCGGCTGTCTGTATACAAAAACGCCGTA |
| | AAGTTTGAGCGAAGTCAATAAACTCTCTACCCATTCAGGGCAATATCT |
| | CTCTTGGATCCCTCTAGAAATAATTTTGTTTAACTTTAAGAAGGAGAT |
| | ATACAT |

TABLE 19
FNR Promoter sequences

| FNR-responsive | |
|---|---|
| regulatory region | 12345678901234567890123456789012345678901234567890 |
| SEQ ID NO: 185 | ATCCCCATCACTCTTGATGGAGATCAATTCCCCAAGCTGCTA |
| | GAGCGTTACCTTGCCCTTAAACATTAGCAATGTCGATTTATC |
| | AGAGGGCCGACAGGCTCCCACAGGAGAAAACCG |
| SEQ ID NO: 186 | CTCTTGATCGTTATCAATTCCCACGCTGTTTCAGAGCGTTAC |
| | CTTGCCCTTAAACATTAGCAATGTCGATTTATCAGAGGGCCG |
| | ACAGGCTCCCACAGGAGAAAACCG |
| nirB1 | GTCAGCATAACACCCTGACCTCTCATTAATTGTTCATGCCGG |
| SEQ ID NO: 187 | GCGGCACTATCGTCGTCCGGCCTTTTCCTCTCTTACTCTGCTA |
| | CGTACATCTATTTCTATAAATCCGTTCAATTTGTCTGTTTTTT |
| | GCACAAACATGAAATATCAGACAATTCCGTGACTTAAGAAA |
| | ATTTATACAAATCAGCAATATACCCCTTAAGGAGTATATAA |
| | AGGTGAATTTGATTTACATCAATAAGCGGGGTTGCTGAATC |
| | GTTAAGGTAGGCGGTAATAGAAAAGAAATCGAGGCAAAA |
| nirB2 | CGGCCCGATCGTTGAACATAGCGGTCCGCAGGCGGCACTGC |
| SEQ ID NO: 188 | TTACAGCAAACGGTCTGTACGCTGTCGTCTTTGTGATGTGCT |
| | TCCTGTTAGGTTTCGTCAGCCGTCACCGTCAGCATAACACCC |
| | TGACCTCTCATTAATTGCTCATGCCGGACGGCACTATCGTCG |
| | TCCGGCCTTTTCCTCTCTTCCCCCGCTACGTGCATCTATTTCT |
| | ATAAACCCGCTCATTTTGTCTATTTTTTGCACAAACATGAAA |
| | TATCAGACAATTCCGTGACTTAAGAAAATTTATACAAATCA |
| | GCAATATACCCATTAAGGAGTATATAAAGGTGAATTTGATTT |
| | ACATCAATAAGCGGGGTTGCTGAATCGTTAAGGTAGGCGGT |
| | AATAGAAAAGAAATCGAGGCAAAAatgtttgtttaactttaagaaggagatat |
| | acat |
| nirB3 | GTCAGCATAACACCCTGACCTCTCATTAATTGCTCATGCCGG |
| SEQ ID NO: 189 | ACGGCACTATCGTCGTCCGGCCTTTTCCTCTCTTCCCCCGCTA |
| | CGTGCATCTATTTCTATAAACCCGCTCATTTTGTCTATTTTTT |
| | GCACAAACATGAAATATCAGACAATTCCGTGACTTAAGAAA |
| | ATTTATACAAATCAGCAATATACCCATTAAGGAGTATATAA |
| | AGGTGAATTTGATTTACATCAATAAGCGGGGTTGCTGAATC |
| | GTTAAGGTAGGCGGTAATAGAAAAGAAATCGAGGCAAAA |
| ydfZ | ATTTCCTCTCATCCCATCCGGGGTGAGAGTCTTTTCCCCCGA |
| SEQ ID NO: 190 | CTTATGGCTCATGCATGCATCAAAAAAGATGTGAGCTTGATC |
| | AAAAACAAAAAATATTTCACTCGACAGGAGTATTTATATTG |
| | CGCCCGTTACGTGGGCTTCGACTGTAAATCAGAAAGGAGAA |
| | AACACCT |
| nirB + RBS | GTCAGCATAACACCCTGACCTCTCATTAATTGTTCATGCCGG |
| SEQ ID NO: 191 | GCGGCACTATCGTCGTCCGGCCTTTTCCTCTCTTACTCTGCTA |
| | CGTACATCTATTTCTATAAATCCGTTCAATTTGTCTGTTTTTT |
| | GCACAAACATGAAATATCAGACAATTCCGTGACTTAAGAAA |
| | ATTTATACAAATCAGCAATATACCCCTTAAGGAGTATATAA |
| | AGGTGAATTTGATTTACATCAATAAGCGGGGTTGCTGAATC |
| | GTTAAGGATCCCTCTAGAAATAATTTTGTTTAACTTTAAGAA |
| | GGAGATATACAT |
| ydfZ + RBS | CATTTCCTCTCATCCCATCCGGGGTGAGAGTCTTTTCCCCCG |
| SEQ ID NO: 192 | ACTTATGGCTCATGCATGCATCAAAAAAGATGTGAGCTTGA |
| | TCAAAAACAAAAAATATTTCACTCGACAGGAGTATTTATATT |
| | GCGCCCGGATCCCTCTAGAAATAATTTTGTTTAACTTTAAGA |
| | AGGAGATATACAT |
| fnrS1 | AGTTGTTCTTATTGGTGGTGTTGCTTTATGGTTGCATCGTAGT |
| SEQ ID NO: 193 | AAATGGTTGTAACAAAAGCAATTTTTCCGGCTGTCTGTATAC |
| | AAAAACGCCGTAAAGTTTGAGCGAAGTCAATAAACTCTCTA |
| | CCCATTCAGGGCAATATCTCTCTTGGATCCCTCTAGAAATA |
| | ATTTTGTTTAACTTTAAGAAGGAGATATACAT |
| fnrS2 | AGTTGTTCTTATTGGTGGTGTTGCTTTATGGTTGCATCGTAGT |
| SEQ ID NO: 194 | AAATGGTTGTAACAAAAGCAATTTTTCCGGCTGTCTGTATAC |
| | AAAAACGCCGCAAAGTTTGAGCGAAGTCAATAAACTCTCTA |
| | CCCATTCAGGGCAATATCTCTCTTGGATCCAAAGTGAACTCT |
| | AGAAATAATTTTGTTTAACTTTAAGAAGGAGATATACAT |
| nirB + crp | TCGTCTTTGTGATGTGCTTCCTGTTAGGTTTCGTCAGCCGTCA |
| SEQ ID NO: 195 | CCGTCAGCATAACACCCTGACCTCTCATTAATTGCTCATGCC |
| | GGACGGCACTATCGTCGTCCGGCCTTTTCCTCTCTTCCCCCG |
| | CTACGTGCATCTATTTCTATAAACCCGCTCATTTTGTCTATTT |
| | TTTGCACAAACATGAAATATCAGACAATTCCGTGACTTAAG |
| | AAAATTTATACAAATCAGCAATATACCCATTAAGGAGTATA |
| | TAAAGGTGAATTTGATTTACATCAATAAGCGGGGTTGCTGA |
| | ATCGTTAAGGTAGaaatgtgatctagttcacatttGCGGTAATAGAAAAG |
| | AAATCGAGGCAAAAatgtttgtttaactttaagaaggagatatacat |
| fnrS + crp | AGTTGTTCTTATTGGTGGTGTTGCTTTATGGTTGCATCGTAGT |
| SEQ ID NO: 196 | AAATGGTTGTAACAAAAGCAATTTTTCCGGCTGTCTGTATAC |
| | AAAAACGCCGCAAAGTTTGAGCGAAGTCAATAAACTCTCTA |
| | CCCATTCAGGGCAATATCTCTCaaatgtgatctagttcacattttttgtttaacttta |
| | agaaggagatatacat |

[0630] FNR promoter sequences are known in the art, and any suitable FNR promoter sequence(s) may be used in the genetically engineered bacteria of the invention. Any suitable FNR promoter(s) may be combined with any suitable payload.

[0631] As used herein the term “payload” refers to one or more e.g. anti-inflammation and/or gut barrier function enhancer molecule(s), including but not limited to, butyrate, propionate, acetate, IL10, IL-2, IL-22, IL-27, IL-20, IL-24, IL-19, SOD, GLP2, GLP1, and/or tryptophan and/or its metabolites. As used herein, the term “polypeptide of interest” or “polypeptides of interest”, “protein of interest”, “proteins of interest”, “payload”, “payloads” further includes any or a plurality of any of the short chain fatty acid producing enzymes, trypophan synthesis, tryptophan metabolite producing enzymes, or bile salt hydrolases and/or bile salt transporters or exporters, enzymes producing any gut barrier enhancer and/or anti-inflammatory metabolite, metabolite transporters or exporters, described herein. As used herein, the term “gene of interest” or “gene sequence of interest” includes any or a plurality of any of the gene(s) an/or gene sequence(s) and or gene cassette(s) encoding one or more anti-inflammation and/or gut barrier function enhancer molecule(s) described herein.

[0632] Non-limiting FNR promoter sequences are provided in Table 6. Table 6 depicts the nucleic acid sequences of exemplary regulatory region sequences comprising a FNR-responsive promoter sequence. Underlined sequences are predicted ribosome binding sites, and bolded sequences are restriction sites used for cloning. In some embodiments, the genetically engineered bacteria of the invention comprise one or more of: SEQ ID NO: 180, SEQ ID NO: 181, SEQ ID NO: 182, SEQ ID NO: 183, SEQ ID NO: 184, SEQ ID NO: 185, SEQ ID NO: 186, nirB1 promoter (SEQ ID NO: 187), nirB2 promoter (SEQ ID NO: 188), nirB3 promoter (SEQ ID NO: 189), ydfZ promoter (SEQ ID NO: 190), nirB promoter fused to a strong ribosome binding site (SEQ ID NO: 191), ydfZ promoter fused to a strong ribosome binding site (SEQ ID NO: 192), fnrS, an anaerobically induced small RNA gene (fnrS1 promoter SEQ ID NO: 193 or fnrS2 promoter SEQ ID NO: 194), nirB promoter fused to a crp binding site (SEQ ID NO: 195), and fnrS fused to a crp binding site (SEQ ID NO: 196).

[0633] In some embodiments, multiple distinct FNR nucleic acid sequences are inserted in the genetically engineered bacteria. In alternate embodiments, the genetically engineered bacteria comprise a gene encoding a payload expressed under the control of an alternate oxygen level-dependent promoter, e.g., DNR (Trunk et al., 2010) or ANR (Ray et al., 1997). In these embodiments, expression of the payload gene is particularly activated in a low-oxygen or anaerobic environment, such as in the gut. In some embodiments, gene expression is further optimized by methods known in the art, e.g., by optimizing ribosomal binding sites and/or increasing mRNA stability. In one embodiment, the mammalian gut is a human mammalian gut.

[0634] In another embodiment, the genetically engineered bacteria comprise the gene or gene cassette for producing the metabolic and/or satiety effector and/or immune modulator molecule expressed under the control of anaerobic regulation of arginine deiminiase and nitrate reduction transcriptional regulator (ANR). In P. aeruginosa, ANR is “required for the expression of physiological functions which are inducible under oxygen-limiting or anaerobic conditions” (Winteler et al., 1996; Sawers 1991). P. aeruginosa ANR is homologous with E. coli FNR, and “the consensus FNR site (TTGAT----ATCAA) was recognized efficiently by ANR and FNR” (Winteler et al., 1996). Like FNR, in the anaerobic state, ANR activates numerous genes responsible for adapting to anaerobic growth. In the aerobic state, ANR is inactive. Pseudomonas fluorescens, Pseudomonas putida, Pseudomonas syringae, and Pseudomonas mendocina all have functional analogs of ANR (Zimmermann et al., 1991). Promoters that are regulated by ANR are known in the art, e.g., the promoter of the arcDABC operon (see, e.g., Hasegawa et al., 1998).

[0635] In other embodiments, the one or more gene sequence(s) for producing a payload are expressed under the control of an oxygen level-dependent promoter fused to a binding site for a transcriptional activator, e.g., CRP. CRP (cyclic AMP receptor protein or catabolite activator protein or CAP) plays a major regulatory role in bacteria by repressing genes responsible for the uptake, metabolism, and assimilation of less favorable carbon sources when rapidly metabolizable carbohydrates, such as glucose, are present (Wu et al., 2015). This preference for glucose has been termed glucose repression, as well as carbon catabolite repression (Deutscher, 2008; Görke and Stülke, 2008). In some embodiments, the gene or gene cassette for producing an anti-inflammation and/or gut barrier function enhancer molecule is controlled by an oxygen level-dependent promoter fused to a CRP binding site. In some embodiments, the one or more gene sequence(s) for a payload are controlled by a FNR promoter fused to a CRP binding site. In these embodiments, cyclic AMP binds to CRP when no glucose is present in the environment. This binding causes a conformational change in CRP, and allows CRP to bind tightly to its binding site. CRP binding then activates transcription of the gene or gene cassette by recruiting RNA polymerase to the FNR promoter via direct protein-protein interactions. In the presence of glucose, cyclic AMP does not bind to CRP and transcription of the gene or gene cassette for producing an payload is repressed. In some embodiments, an oxygen level-dependent promoter (e.g., an FNR promoter) fused to a binding site for a transcriptional activator is used to ensure that the gene or gene cassette for producing an payload is not expressed under anaerobic conditions when sufficient amounts of glucose are present, e.g., by adding glucose to growth media in vitro.

[0636] In some embodiments, the genetically engineered bacteria comprise an oxygen level-dependent promoter from a different species, strain, or substrain of bacteria. In some embodiments, the genetically engineered bacteria comprise an oxygen level-sensing transcription factor, e.g., FNR, ANR or DNR, from a different species, strain, or substrain of bacteria. In some embodiments, the genetically engineered bacteria comprise an oxygen level-sensing transcription factor and corresponding promoter from a different species, strain, or substrain of bacteria. The heterologous oxygen-level dependent transcriptional regulator and/or promoter increases the transcription of genes operably linked to said promoter, e.g., one or more gene sequence(s) for producing the payload(s) in a low-oxygen or anaerobic environment, as compared to the native gene(s) and promoter in the bacteria under the same conditions. In certain embodiments, the non-native oxygen-level dependent transcriptional regulator is an FNR protein from N. gonorrhoeae (see, e.g., Isabella et al., 2011). In some embodiments, the corresponding wild-type transcriptional regulator is left intact and retains wild-type activity. In alternate embodiments, the corresponding wild-type transcriptional regulator is deleted or mutated to reduce or eliminate wild-type activity.

[0637] In some embodiments, the genetically engineered bacteria comprise a wild-type oxygen-level dependent transcriptional regulator, e.g., FNR, ANR, or DNR, and corresponding promoter that is mutated relative to the wild-type promoter from bacteria of the same subtype. The mutated promoter enhances binding to the wild-type transcriptional regulator and increases the transcription of genes operably linked to said promoter, e.g., the gene encoding the payload, in a low-oxygen or anaerobic environment, as compared to the wild-type promoter under the same conditions. In some embodiments, the genetically engineered bacteria comprise a wild-type oxygen-level dependent promoter, e.g., FNR, ANR, or DNR promoter, and corresponding transcriptional regulator that is mutated relative to the wild-type transcriptional regulator from bacteria of the same subtype. The mutated transcriptional regulator enhances binding to the wild-type promoter and increases the transcription of genes operably linked to said promoter, e.g., the gene encoding the payload, in a low-oxygen or anaerobic environment, as compared to the wild-type transcriptional regulator under the same conditions. In certain embodiments, the mutant oxygen-level dependent transcriptional regulator is an FNR protein comprising amino acid substitutions that enhance dimerization and FNR activity (see, e.g., Moore et al., (2006). In some embodiments, both the oxygen level-sensing transcriptional regulator and corresponding promoter are mutated relative to the wild-type sequences from bacteria of the same subtype in order to increase expression of the payload in low-oxygen conditions.

[0638] In some embodiments, the bacterial cells comprise multiple copies of the endogenous gene encoding the oxygen level-sensing transcriptional regulator, e.g., the FNR gene. In some embodiments, the gene encoding the oxygen level-sensing transcriptional regulator is present on a plasmid. In some embodiments, the gene encoding the oxygen level-sensing transcriptional regulator and the gene encoding the payload are present on different plasmids. In some embodiments, the gene encoding the oxygen level-sensing transcriptional regulator and the gene encoding the payload are present on the same plasmid.

[0639] In some embodiments, the gene encoding the oxygen level-sensing transcriptional regulator is present on a chromosome. In some embodiments, the gene encoding the oxygen level-sensing transcriptional regulator and the gene encoding the payload are present on different chromosomes. In some embodiments, the gene encoding the oxygen level-sensing transcriptional regulator and the gene encoding the payload are present on the same chromosome. In some instances, it may be advantageous to express the oxygen level-sensing transcriptional regulator under the control of an inducible promoter in order to enhance expression stability. In some embodiments, expression of the transcriptional regulator is controlled by a different promoter than the promoter that controls expression of the gene encoding the payload. In some embodiments, expression of the transcriptional regulator is controlled by the same promoter that controls expression of the payload. In some embodiments, the transcriptional regulator and the payload are divergently transcribed from a promoter region.

### RNS-Dependent Regulation

[0640] In some embodiments, the genetically engineered bacteria or genetically engineered virus comprise a gene encoding a payload that is expressed under the control of an inducible promoter. In some embodiments, the genetically engineered bacterium or genetically engineered virus that expresses a payload under the control of a promoter that is activated by inflammatory conditions. In one embodiment, the gene for producing the payload is expressed under the control of an inflammatory-dependent promoter that is activated in inflammatory environments, e.g., a reactive nitrogen species or RNS promoter.

[0641] As used herein, “reactive nitrogen species” and “RNS” are used interchangeably to refer to highly active molecules, ions, and/or radicals derived from molecular nitrogen. RNS can cause deleterious cellular effects such as nitrosative stress. RNS includes, but is not limited to, nitric oxide (NO●), peroxynitrite or peroxynitrite anion (ONOO—), nitrogen dioxide (●NO2), dinitrogen trioxide (N2O3), peroxynitrous acid (ONOOH), and nitroperoxycarbonate (ONOOCO2—) (unpaired electrons denoted by ●). Bacteria have evolved transcription factors that are capable of sensing RNS levels. Different RNS signaling pathways are triggered by different RNS levels and occur with different kinetics.

[0642] As used herein, “RNS-inducible regulatory region” refers to a nucleic acid sequence to which one or more RNS-sensing transcription factors is capable of binding, wherein the binding and/or activation of the corresponding transcription factor activates downstream gene expression; in the presence of RNS, the transcription factor binds to and/or activates the regulatory region. In some embodiments, the RNS- inducible regulatory region comprises a promoter sequence. In some embodiments, the transcription factor senses RNS and subsequently binds to the RNS-inducible regulatory region, thereby activating downstream gene expression. In alternate embodiments, the transcription factor is bound to the RNS-inducible regulatory region in the absence of RNS; in the presence of RNS, the transcription factor undergoes a conformational change, thereby activating downstream gene expression. The RNS-inducible regulatory region may be operatively linked to a gene or genes, e.g., a payload gene sequence(s), e.g., any of the payloads described herein. For example, in the presence of RNS, a transcription factor senses RNS and activates a corresponding RNS-inducible regulatory region, thereby driving expression of an operatively linked gene sequence. Thus, RNS induces expression of the gene or gene sequences.

[0643] As used herein, “RNS-derepressible regulatory region” refers to a nucleic acid sequence to which one or more RNS-sensing transcription factors is capable of binding, wherein the binding of the corresponding transcription factor represses downstream gene expression; in the presence of RNS, the transcription factor does not bind to and does not repress the regulatory region. In some embodiments, the RNS-derepressible regulatory region comprises a promoter sequence. The RNS-derepressible regulatory region may be operatively linked to a gene or genes, e.g., a payload gene sequence(s). For example, in the presence of RNS, a transcription factor senses RNS and no longer binds to and/or represses the regulatory region, thereby derepressing an operatively linked gene sequence or gene cassette. Thus, RNS derepresses expression of the gene or genes.

[0644] As used herein, “RNS-repressible regulatory region” refers to a nucleic acid sequence to which one or more RNS-sensing transcription factors is capable of binding, wherein the binding of the corresponding transcription factor represses downstream gene expression; in the presence of RNS, the transcription factor binds to and represses the regulatory region. In some embodiments, the RNS-repressible regulatory region comprises a promoter sequence. In some embodiments, the transcription factor that senses RNS is capable of binding to a regulatory region that overlaps with part of the promoter sequence. In alternate embodiments, the transcription factor that senses RNS is capable of binding to a regulatory region that is upstream or downstream of the promoter sequence. The RNS-repressible regulatory region may be operatively linked to a gene sequence or gene cassette. For example, in the presence of RNS, a transcription factor senses RNS and binds to a corresponding RNS-repressible regulatory region, thereby blocking expression of an operatively linked gene sequence or gene sequences. Thus, RNS represses expression of the gene or gene sequences.

[0645] As used herein, a “RNS-responsive regulatory region” refers to a RNS-inducible regulatory region, a RNS-repressible regulatory region, and/or a RNS-derepressible regulatory region. In some embodiments, the RNS-responsive regulatory region comprises a promoter sequence. Each regulatory region is capable of binding at least one corresponding RNS-sensing transcription factor. Examples of transcription factors that sense RNS and their corresponding RNS-responsive genes, promoters, and/or regulatory regions include, but are not limited to, those shown in Table 20.

TABLE 20
Examples of RNS-sensing transcription
factors and RNS-responsive genes

| | | Examples of responsive genes, |
|---|---|---|
| RNS-sensing | Primarily capable | promoters, and/or regulatory |
| transcription factor: | of sensing: | regions: |
| NsrR | NO | norB, aniA, nsrR, hmpA, ytfE, |
| | | ygbA, hcp, hcr, nrfA, aox |
| NorR | NO | norVW, norR |
| DNR | NO | norCB, nir, nor, nos |

[0646] 1.

[0647] In some embodiments, the genetically engineered bacteria of the invention comprise a tunable regulatory region that is directly or indirectly controlled by a transcription factor that is capable of sensing at least one reactive nitrogen species. The tunable regulatory region is operatively linked to a gene or genes capable of directly or indirectly driving the expression of a payload, thus controlling expression of the payload relative to RNS levels. For example, the tunable regulatory region is a RNS-inducible regulatory region, and the payload is a payload, such as any of the payloads provided herein; when RNS is present, e.g., in an inflamed tissue, a RNS-sensing transcription factor binds to and/or activates the regulatory region and drives expression of the payload gene or genes. Subsequently, when inflammation is ameliorated, RNS levels are reduced, and production of the payload is decreased or eliminated.

[0648] In some embodiments, the tunable regulatory region is a RNS-inducible regulatory region; in the presence of RNS, a transcription factor senses RNS and activates the RNS-inducible regulatory region, thereby driving expression of an operatively linked gene or genes. In some embodiments, the transcription factor senses RNS and subsequently binds to the RNS-inducible regulatory region, thereby activating downstream gene expression. In alternate embodiments, the transcription factor is bound to the RNS-inducible regulatory region in the absence of RNS; when the transcription factor senses RNS, it undergoes a conformational change, thereby inducing downstream gene expression.

[0649] In some embodiments, the tunable regulatory region is a RNS-inducible regulatory region, and the transcription factor that senses RNS is NorR. NorR “is an NO-responsive transcriptional activator that regulates expression of the norVW genes encoding flavorubredoxin and an associated flavoprotein, which reduce NO to nitrous oxide” (Spiro 2006). The genetically engineered bacteria of the invention may comprise any suitable RNS-responsive regulatory region from a gene that is activated by NorR. Genes that are capable of being activated by NorR are known in the art (see, e.g., Spiro 2006; Vine et al., 2011; Karlinsey et al., 2012). In certain embodiments, the genetically engineered bacteria of the invention comprise a RNS-inducible regulatory region from norVW that is operatively linked to a gene or genes, e.g., one or more payload gene sequence(s). In the presence of RNS, a NorR transcription factor senses RNS and activates to the norVW regulatory region, thereby driving expression of the operatively linked gene(s) and producing the payload(s).

[0650] In some embodiments, the tunable regulatory region is a RNS-inducible regulatory region, and the transcription factor that senses RNS is DNR. DNR (dissimilatory nitrate respiration regulator) “promotes the expression of the nir, the nor and the nos genes” in the presence of nitric oxide (Castiglione et al., 2009). The genetically engineered bacteria of the invention may comprise any suitable RNS-responsive regulatory region from a gene that is activated by DNR. Genes that are capable of being activated by DNR are known in the art (see, e.g., Castiglione et al., 2009; Giardina et al., 2008). In certain embodiments, the genetically engineered bacteria of the invention comprise a RNS-inducible regulatory region from norCB that is operatively linked to a gene or gene cassette, e.g., a butyrogenic gene cassette. In the presence of RNS, a DNR transcription factor senses RNS and activates to the norCB regulatory region, thereby driving expression of the operatively linked gene or genes and producing one or more payloads. In some embodiments, the DNR is Pseudomonas aeruginosa DNR.

[0651] In another embodiment, the genetically engineered bacteria comprise the gene or gene cassette for producing the metabolic and/or satiety effector and/or immune modulator molecule expressed under the control of the dissimilatory nitrate respiration regulator (DNR). DNR is a member of the FNR family (Arai et al., 1995) and is a transcriptional regulator that is required in conjunction with ANR for “anaerobic nitrate respiration of Pseudomonas aeruginosa” (Hasegawa et al., 1998). For certain genes, the FNR-binding motifs “are probably recognized only by DNR” (Hasegawa et al., 1998). Any suitable transcriptional regulator that is controlled by exogenous environmental conditions and corresponding regulatory region may be used. Non-limiting examples include ArcA/B, ResD/E, NreA/B/C, and AirSR, and others are known in the art.

[0652] In some embodiments, the tunable regulatory region is a RNS-derepressible regulatory region, and binding of a corresponding transcription factor represses downstream gene expression; in the presence of RNS, the transcription factor no longer binds to the regulatory region, thereby derepressing the operatively linked gene or gene cassette.

[0653] In some embodiments, the tunable regulatory region is a RNS-derepressible regulatory region, and the transcription factor that senses RNS is NsrR. NsrR is “an Rrf2-type transcriptional repressor [that] can sense NO and control the expression of genes responsible for NO metabolism” (Isabella et al., 2009). The genetically engineered bacteria of the invention may comprise any suitable RNS-responsive regulatory region from a gene that is repressed by NsrR. In some embodiments, the NsrR is Neisseria gonorrhoeae NsrR. Genes that are capable of being repressed by NsrR are known in the art (see, e.g., Isabella et al., 2009; Dunn et al., 2010). In certain embodiments, the genetically engineered bacteria of the invention comprise a RNS-derepressible regulatory region from norB that is operatively linked to a gene or genes, e.g., a payload gene or genes. In the presence of RNS, an NsrR transcription factor senses RNS and no longer binds to the norB regulatory region, thereby derepressing the operatively linked a payload gene or genes and producing the encoding a payload(s).

[0654] In some embodiments, it is advantageous for the genetically engineered bacteria to express a RNS-sensing transcription factor that does not regulate the expression of a significant number of native genes in the bacteria. In some embodiments, the genetically engineered bacterium of the invention expresses a RNS-sensing transcription factor from a different species, strain, or substrain of bacteria, wherein the transcription factor does not bind to regulatory sequences in the genetically engineered bacterium of the invention. In some embodiments, the genetically engineered bacterium of the invention is Escherichia coli, and the RNS-sensing transcription factor is NsrR, e.g., from is Neisseria gonorrhoeae, wherein the Escherichia coli does not comprise binding sites for said NsrR. In some embodiments, the heterologous transcription factor minimizes or eliminates off-target effects on endogenous regulatory regions and genes in the genetically engineered bacteria.

[0655] In some embodiments, the tunable regulatory region is a RNS-repressible regulatory region, and binding of a corresponding transcription factor represses downstream gene expression; in the presence of RNS, the transcription factor senses RNS and binds to the RNS-repressible regulatory region, thereby repressing expression of the operatively linked gene or gene cassette. In some embodiments, the RNS-sensing transcription factor is capable of binding to a regulatory region that overlaps with part of the promoter sequence. In alternate embodiments, the RNS-sensing transcription factor is capable of binding to a regulatory region that is upstream or downstream of the promoter sequence.

[0656] In these embodiments, the genetically engineered bacteria may comprise a two repressor activation regulatory circuit, which is used to express a payload. The two repressor activation regulatory circuit comprises a first RNS-sensing repressor and a second repressor, which is operatively linked to a gene or gene cassette, e.g., encoding a payload. In one aspect of these embodiments, the RNS-sensing repressor inhibits transcription of the second repressor, which inhibits the transcription of the gene or gene cassette. Examples of second repressors useful in these embodiments, include, but are not limited to, TetR, C1, and LexA. In the absence of binding by the first repressor (which occurs in the absence of RNS), the second repressor is transcribed, which represses expression of the gene or genes. In the presence of binding by the first repressor (which occurs in the presence of RNS), expression of the second repressor is repressed, and the gene or genes, e.g., a payload gene or genes is expressed.

[0657] A RNS-responsive transcription factor may induce, derepress, or repress gene expression depending upon the regulatory region sequence used in the genetically engineered bacteria. One or more types of RNS-sensing transcription factors and corresponding regulatory region sequences may be present in genetically engineered bacteria. In some embodiments, the genetically engineered bacteria comprise one type of RNS-sensing transcription factor, e.g., NsrR, and one corresponding regulatory region sequence, e.g., from norB. In some embodiments, the genetically engineered bacteria comprise one type of RNS-sensing transcription factor, e.g., NsrR, and two or more different corresponding regulatory region sequences, e.g., from norB and aniA. In some embodiments, the genetically engineered bacteria comprise two or more types of RNS-sensing transcription factors, e.g., NsrR and NorR, and two or more corresponding regulatory region sequences, e.g., from norB and norR, respectively. One RNS-responsive regulatory region may be capable of binding more than one transcription factor. In some embodiments, the genetically engineered bacteria comprise two or more types of RNS-sensing transcription factors and one corresponding regulatory region sequence. Nucleic acid sequences of several RNS-regulated regulatory regions are known in the art (see, e.g., Spiro 2006; Isabella et al., 2009; Dunn et al., 2010; Vine et al., 2011; Karlinsey et al., 2012).

[0658] In some embodiments, the genetically engineered bacteria of the invention comprise a gene encoding a RNS-sensing transcription factor, e.g., the nsrR gene, that is controlled by its native promoter, an inducible promoter, a promoter that is stronger than the native promoter, e.g., the GlnRS promoter or the P(Bla) promoter, or a constitutive promoter. In some instances, it may be advantageous to express the RNS-sensing transcription factor under the control of an inducible promoter in order to enhance expression stability. In some embodiments, expression of the RNS-sensing transcription factor is controlled by a different promoter than the promoter that controls expression of the therapeutic molecule. In some embodiments, expression of the RNS-sensing transcription factor is controlled by the same promoter that controls expression of the therapeutic molecule. In some embodiments, the RNS-sensing transcription factor and therapeutic molecule are divergently transcribed from a promoter region.

[0659] In some embodiments, the genetically engineered bacteria of the invention comprise a gene for a RNS-sensing transcription factor from a different species, strain, or substrain of bacteria. In some embodiments, the genetically engineered bacteria comprise a RNS-responsive regulatory region from a different species, strain, or substrain of bacteria. In some embodiments, the genetically engineered bacteria comprise a RNS-sensing transcription factor and corresponding RNS-responsive regulatory region from a different species, strain, or substrain of bacteria. The heterologous RNS-sensing transcription factor and regulatory region may increase the transcription of genes operatively linked to said regulatory region in the presence of RNS, as compared to the native transcription factor and regulatory region from bacteria of the same subtype under the same conditions.

[0660] In some embodiments, the genetically engineered bacteria comprise a RNS-sensing transcription factor, NsrR, and corresponding regulatory region, nsrR, from Neisseria gonorrhoeae. In some embodiments, the native RNS-sensing transcription factor, e.g., NsrR, is left intact and retains wild-type activity. In alternate embodiments, the native RNS-sensing transcription factor, e.g., NsrR, is deleted or mutated to reduce or eliminate wild-type activity.

[0661] In some embodiments, the genetically engineered bacteria of the invention comprise multiple copies of the endogenous gene encoding the RNS-sensing transcription factor, e.g., the nsrR gene. In some embodiments, the gene encoding the RNS-sensing transcription factor is present on a plasmid. In some embodiments, the gene encoding the RNS-sensing transcription factor and the gene or gene cassette for producing the therapeutic molecule are present on different plasmids. In some embodiments, the gene encoding the RNS-sensing transcription factor and the gene or gene cassette for producing the therapeutic molecule are present on the same plasmid. In some embodiments, the gene encoding the RNS-sensing transcription factor is present on a chromosome. In some embodiments, the gene encoding the RNS-sensing transcription factor and the gene or gene cassette for producing the therapeutic molecule are present on different chromosomes. In some embodiments, the gene encoding the RNS-sensing transcription factor and the gene or gene cassette for producing the therapeutic molecule are present on the same chromosome.

[0662] In some embodiments, the genetically engineered bacteria comprise a wild-type gene encoding a RNS-sensing transcription factor, e.g., the NsrR gene, and a corresponding regulatory region, e.g., a norB regulatory region, that is mutated relative to the wild-type regulatory region from bacteria of the same subtype. The mutated regulatory region increases the expression of the payload in the presence of RNS, as compared to the wild-type regulatory region under the same conditions. In some embodiments, the genetically engineered bacteria comprise a wild-type RNS-responsive regulatory region, e.g., the norB regulatory region, and a corresponding transcription factor, e.g., NsrR, that is mutated relative to the wild-type transcription factor from bacteria of the same subtype. The mutant transcription factor increases the expression of the payload in the presence of RNS, as compared to the wild-type transcription factor under the same conditions. In some embodiments, both the RNS-sensing transcription factor and corresponding regulatory region are mutated relative to the wild-type sequences from bacteria of the same subtype in order to increase expression of the payload in the presence of RNS.

[0663] In some embodiments, the gene or gene cassette for producing the anti-inflammation and/or gut barrier function enhancer molecule is present on a plasmid and operably linked to a promoter that is induced by RNS. In some embodiments, expression is further optimized by methods known in the art, e.g., by optimizing ribosomal binding sites, manipulating transcriptional regulators, and/or increasing mRNA stability.

[0664] In some embodiments, any of the gene(s) of the present disclosure may be integrated into the bacterial chromosome at one or more integration sites. For example, one or more copies of one or more encoding a payload gene(s) may be integrated into the bacterial chromosome. Having multiple copies of the gene or gen(s) integrated into the chromosome allows for greater production of the payload(s) and also permits fine-tuning of the level of expression. Alternatively, different circuits described herein, such as any of the secretion or exporter circuits, in addition to the therapeutic gene(s) or gene cassette(s) could be integrated into the bacterial chromosome at one or more different integration sites to perform multiple different functions.

[0665] In some embodiments, the genetically engineered bacteria of the invention produce at least one payload in the presence of RNS to reduce local gut inflammation by at least about 1.5-fold, at least about 2-fold, at least about 10-fold, at least about 15-fold, at least about 20-fold, at least about 30-fold, at least about 50-fold, at least about 100-fold, at least about 200-fold, at least about 300-fold, at least about 400-fold, at least about 500-fold, at least about 600-fold, at least about 700-fold, at least about 800-fold, at least about 900-fold, at least about 1,000-fold, or at least about 1,500-fold as compared to unmodified bacteria of the same subtype under the same conditions. Inflammation may be measured by methods known in the art, e.g., counting disease lesions using endoscopy; detecting T regulatory cell differentiation in peripheral blood, e.g., by fluorescence activated sorting; measuring T regulatory cell levels; measuring cytokine levels; measuring areas of mucosal damage; assaying inflammatory biomarkers, e.g., by qPCR; PCR arrays; transcription factor phosphorylation assays; immunoassays; and/or cytokine assay kits (Mesoscale, Cayman Chemical, Qiagen).

[0666] In some embodiments, the genetically engineered bacteria produce at least about 1.5-fold, at least about 2-fold, at least about 10-fold, at least about 15-fold, at least about 20-fold, at least about 30-fold, at least about 50-fold, at least about 100-fold, at least about 200-fold, at least about 300-fold, at least about 400-fold, at least about 500-fold, at least about 600-fold, at least about 700-fold, at least about 800-fold, at least about 900-fold, at least about 1,000-fold, or at least about 1,500-fold more of payload in the presence of RNS than unmodified bacteria of the same subtype under the same conditions. Certain unmodified bacteria will not have detectable levels of the payload. In embodiments using genetically modified forms of these bacteria, payload will be detectable in the presence of RNS.

### ROS-Dependent Regulation

[0667] In some embodiments, the genetically engineered bacteria or genetically engineered virus comprise a gene for producing a payload that is expressed under the control of an inducible promoter. In some embodiments, the genetically engineered bacterium or genetically engineered virus that expresses a payload under the control of a promoter that is activated by conditions of cellular damage. In one embodiment, the gene for producing the payload is expressed under the control of an cellular damaged-dependent promoter that is activated in environments in which there is cellular or tissue damage, e.g., a reactive oxygen species or ROS promoter.

[0668] As used herein, “reactive oxygen species” and “ROS” are used interchangeably to refer to highly active molecules, ions, and/or radicals derived from molecular oxygen. ROS can be produced as byproducts of aerobic respiration or metal-catalyzed oxidation and may cause deleterious cellular effects such as oxidative damage. ROS includes, but is not limited to, hydrogen peroxide (H2O2), organic peroxide (ROOH), hydroxyl ion (OH—), hydroxyl radical (●OH), superoxide or superoxide anion (●O2-), singlet oxygen (1O2), ozone (O3), carbonate radical, peroxide or peroxyl radical (●O2-2), hypochlorous acid (HOC1), hypochlorite ion (OC1-), sodium hypochlorite (NaOC1), nitric oxide (NO●), and peroxynitrite or peroxynitrite anion (ONOO—) (unpaired electrons denoted by ●). Bacteria have evolved transcription factors that are capable of sensing ROS levels. Different ROS signaling pathways are triggered by different ROS levels and occur with different kinetics (Marinho et al., 2014).

[0669] As used herein, “ROS-inducible regulatory region” refers to a nucleic acid sequence to which one or more ROS-sensing transcription factors is capable of binding, wherein the binding and/or activation of the corresponding transcription factor activates downstream gene expression; in the presence of ROS, the transcription factor binds to and/or activates the regulatory region. In some embodiments, the ROS-inducible regulatory region comprises a promoter sequence. In some embodiments, the transcription factor senses ROS and subsequently binds to the ROS-inducible regulatory region, thereby activating downstream gene expression. In alternate embodiments, the transcription factor is bound to the ROS-inducible regulatory region in the absence of ROS; in the presence of ROS, the transcription factor undergoes a conformational change, thereby activating downstream gene expression. The ROS-inducible regulatory region may be operatively linked to a gene sequence or gene sequence, e.g., a sequence or sequences encoding one or more payload(s). For example, in the presence of ROS, a transcription factor, e.g., OxyR, senses ROS and activates a corresponding ROS-inducible regulatory region, thereby driving expression of an operatively linked gene sequence or gene sequences. Thus, ROS induces expression of the gene or genes.

[0670] As used herein, “ROS-derepressible regulatory region” refers to a nucleic acid sequence to which one or more ROS-sensing transcription factors is capable of binding, wherein the binding of the corresponding transcription factor represses downstream gene expression; in the presence of ROS, the transcription factor does not bind to and does not repress the regulatory region. In some embodiments, the ROS-derepressible regulatory region comprises a promoter sequence. The ROS-derepressible regulatory region may be operatively linked to a gene or genes, e.g., one or more genes encoding one or more payload(s). For example, in the presence of ROS, a transcription factor, e.g., OhrR, senses ROS and no longer binds to and/or represses the regulatory region, thereby derepressing an operatively linked gene sequence or gene cassette. Thus, ROS derepresses expression of the gene or gene cassette.

[0671] As used herein, “ROS-repressible regulatory region” refers to a nucleic acid sequence to which one or more ROS-sensing transcription factors is capable of binding, wherein the binding of the corresponding transcription factor represses downstream gene expression; in the presence of ROS, the transcription factor binds to and represses the regulatory region. In some embodiments, the ROS-repressible regulatory region comprises a promoter sequence. In some embodiments, the transcription factor that senses ROS is capable of binding to a regulatory region that overlaps with part of the promoter sequence. In alternate embodiments, the transcription factor that senses ROS is capable of binding to a regulatory region that is upstream or downstream of the promoter sequence. The ROS-repressible regulatory region may be operatively linked to a gene sequence or gene sequences. For example, in the presence of ROS, a transcription factor, e.g., PerR, senses ROS and binds to a corresponding ROS-repressible regulatory region, thereby blocking expression of an operatively linked gene sequence or gene sequences. Thus, ROS represses expression of the gene or genes.

[0672] As used herein, a “ROS-responsive regulatory region” refers to a ROS-inducible regulatory region, a ROS-repressible regulatory region, and/or a ROS-derepressible regulatory region. In some embodiments, the ROS-responsive regulatory region comprises a promoter sequence. Each regulatory region is capable of binding at least one corresponding ROS-sensing transcription factor. Examples of transcription factors that sense ROS and their corresponding ROS-responsive genes, promoters, and/or regulatory regions include, but are not limited to, those shown in Table 21.

TABLE 21
Examples of ROS-sensing transcription factors
and ROS-responsive genes

| ROS-sensing | | Examples of responsive genes, |
|---|---|---|
| transcription | Primarily capable | promoters, and/or regulatory |
| factor: | of sensing: | regions: |
| OxyR | H₂O₂ | ahpC; ahpF; dps; dsbG; fhuF; flu; |
| | | fur; gor; grxA; hemH; katG; oxyS; |
| | | sufA; sufB; sufC; sufD; sufE; sufS; |
| | | trxC; uxuA; yaaA; yaeH; yaiA; ybjM; |
| | | ydcH; ydeN; ygaQ; yljA; ytfK |
| PerR | H₂O₂ | katA; ahpCF; mrgA; zoaA; fur; |
| | | hemAXCDBL; srfA |
| OhrR | Organic peroxides | ohrA |
| | NaOCl | |
| SoxR | •O₂⁻ | soxS |
| | NO• | |
| | (also capable of | |
| | sensing H₂O₂) | |
| RosR | H₂O₂ | rbtT; tnp16a; rluC1; tnp5a; mscL; |
| | | tnp2d; phoD; tnp15b; pstA; tnp5b; |
| | | xylC; gabD1; rluC2; cgtS9; azlC; |
| | | narKGHJI; rosR |

[0673] 2.

[0674] In some embodiments, the genetically engineered bacteria comprise a tunable regulatory region that is directly or indirectly controlled by a transcription factor that is capable of sensing at least one reactive oxygen species. The tunable regulatory region is operatively linked to a gene or gene cassette capable of directly or indirectly driving the expression of a payload, thus controlling expression of the payload relative to ROS levels. For example, the tunable regulatory region is a ROS-inducible regulatory region, and the molecule is a payload; when ROS is present, e.g., in an inflamed tissue, a ROS-sensing transcription factor binds to and/or activates the regulatory region and drives expression of the gene sequence for the payload, thereby producing the payload. Subsequently, when inflammation is ameliorated, ROS levels are reduced, and production of the payload is decreased or eliminated.

[0675] In some embodiments, the tunable regulatory region is a ROS-inducible regulatory region; in the presence of ROS, a transcription factor senses ROS and activates the ROS-inducible regulatory region, thereby driving expression of an operatively linked gene or gene cassette. In some embodiments, the transcription factor senses ROS and subsequently binds to the ROS-inducible regulatory region, thereby activating downstream gene expression. In alternate embodiments, the transcription factor is bound to the ROS-inducible regulatory region in the absence of ROS; when the transcription factor senses ROS, it undergoes a conformational change, thereby inducing downstream gene expression.

[0676] In some embodiments, the tunable regulatory region is a ROS-inducible regulatory region, and the transcription factor that senses ROS is OxyR. OxyR “functions primarily as a global regulator of the peroxide stress response” and is capable of regulating dozens of genes, e.g., “genes involved in H2O2 detoxification (katE, ahpCF), heme biosynthesis (hemH), reductant supply (grxA, gor, trxC), thiol-disulfide isomerization (dsbG), Fe-S center repair (sufA-E, sufS), iron binding (yaaA), repression of iron import systems (fur)” and “OxyS, a small regulatory RNA” (Dubbs et al., 2012). The genetically engineered bacteria may comprise any suitable ROS-responsive regulatory region from a gene that is activated by OxyR. Genes that are capable of being activated by OxyR are known in the art (see, e.g., Zheng et al., 2001; Dubbs et al., 2012). In certain embodiments, the genetically engineered bacteria of the invention comprise a ROS-inducible regulatory region from oxyS that is operatively linked to a gene, e.g., a payload gene. In the presence of ROS, e.g., H2O2, an OxyR transcription factor senses ROS and activates to the oxyS regulatory region, thereby driving expression of the operatively linked payload gene and producing the payload. In some embodiments, OxyR is encoded by an E. coli oxyR gene. In some embodiments, the oxyS regulatory region is an E. coli oxyS regulatory region. In some embodiments, the ROS-inducible regulatory region is selected from the regulatory region of katG, dps, and ahpC.

[0677] In alternate embodiments, the tunable regulatory region is a ROS-inducible regulatory region, and the corresponding transcription factor that senses ROS is SoxR. When SoxR is “activated by oxidation of its [2Fe-2S] cluster, it increases the synthesis of SoxS, which then activates its target gene expression” (Koo et al., 2003). “SoxR is known to respond primarily to superoxide and nitric oxide” (Koo et al., 2003), and is also capable of responding to H2O2. The genetically engineered bacteria of the invention may comprise any suitable ROS-responsive regulatory region from a gene that is activated by SoxR. Genes that are capable of being activated by SoxR are known in the art (see, e.g., Koo et al., 2003). In certain embodiments, the genetically engineered bacteria of the invention comprise a ROS-inducible regulatory region from soxS that is operatively linked to a gene, e.g., a payload. In the presence of ROS, the SoxR transcription factor senses ROS and activates the soxS regulatory region, thereby driving expression of the operatively linked a payload gene and producing the a payload.

[0678] In some embodiments, the tunable regulatory region is a ROS-derepressible regulatory region, and binding of a corresponding transcription factor represses downstream gene expression; in the presence of ROS, the transcription factor no longer binds to the regulatory region, thereby derepressing the operatively linked gene or gene cassette.

[0679] In some embodiments, the tunable regulatory region is a ROS-derepressible regulatory region, and the transcription factor that senses ROS is OhrR. OhrR “binds to a pair of inverted repeat DNA sequences overlapping the ohrA promoter site and thereby represses the transcription event,” but oxidized OhrR is “unable to bind its DNA target” (Duarte et al., 2010). OhrR is a “transcriptional repressor [that] . . . senses both organic peroxides and NaOC1” (Dubbs et al., 2012) and is “weakly activated by H2O2 but it shows much higher reactivity for organic hydroperoxides” (Duarte et al., 2010). The genetically engineered bacteria of the invention may comprise any suitable ROS-responsive regulatory region from a gene that is repressed by OhrR. Genes that are capable of being repressed by OhrR are known in the art (see, e.g., Dubbs et al., 2012). In certain embodiments, the genetically engineered bacteria of the invention comprise a ROS-derepressible regulatory region from ohrA that is operatively linked to a gene or gene cassette, e.g., a payload gene. In the presence of ROS, e.g., NaOC1, an OhrR transcription factor senses ROS and no longer binds to the ohrA regulatory region, thereby derepressing the operatively linked payload gene and producing the a payload.

[0680] OhrR is a member of the MarR family of ROS-responsive regulators. “Most members of the MarR family are transcriptional repressors and often bind to the −10 or −35 region in the promoter causing a steric inhibition of RNA polymerase binding” (Bussmann et al., 2010). Other members of this family are known in the art and include, but are not limited to, OspR, MgrA, RosR, and SarZ. In some embodiments, the transcription factor that senses ROS is OspR, MgRA, RosR, and/or SarZ, and the genetically engineered bacteria of the invention comprises one or more corresponding regulatory region sequences from a gene that is repressed by OspR, MgRA, RosR, and/or SarZ. Genes that are capable of being repressed by OspR, MgRA, RosR, and/or SarZ are known in the art (see, e.g., Dubbs et al., 2012).

[0681] In some embodiments, the tunable regulatory region is a ROS-derepressible regulatory region, and the corresponding transcription factor that senses ROS is RosR. RosR is “a MarR-type transcriptional regulator” that binds to an “18-bp inverted repeat with the consensus sequence TTGTTGAYRYRTCAACWA” and is “reversibly inhibited by the oxidant H2O2” (Bussmann et al., 2010). RosR is capable of repressing numerous genes and putative genes, including but not limited to “a putative polyisoprenoid-binding protein (cg1322, gene upstream of and divergent from rosR), a sensory histidine kinase (cgtS9), a putative transcriptional regulator of the Crp/FNR family (cg3291), a protein of the glutathione S-transferase family (cg1426), two putative FMN reductases (cg1150 and cg1850), and four putative monooxygenases (cg0823, cg1848, cg2329, and cg3084)” (Bussmann et al., 2010). The genetically engineered bacteria of the invention may comprise any suitable ROS-responsive regulatory region from a gene that is repressed by RosR. Genes that are capable of being repressed by RosR are known in the art (see, e.g., Bussmann et al., 2010). In certain embodiments, the genetically engineered bacteria of the invention comprise a ROS-derepressible regulatory region from cgtS9 that is operatively linked to a gene or gene cassette, e.g., a payload. In the presence of ROS, e.g., H2O2, a RosR transcription factor senses ROS and no longer binds to the cgtS9 regulatory region, thereby derepressing the operatively linked payload gene and producing the payload.

[0682] In some embodiments, it is advantageous for the genetically engineered bacteria to express a ROS-sensing transcription factor that does not regulate the expression of a significant number of native genes in the bacteria. In some embodiments, the genetically engineered bacterium of the invention expresses a ROS-sensing transcription factor from a different species, strain, or substrain of bacteria, wherein the transcription factor does not bind to regulatory sequences in the genetically engineered bacterium of the invention. In some embodiments, the genetically engineered bacterium of the invention is Escherichia coli, and the ROS-sensing transcription factor is RosR, e.g., from Corynebacterium glutamicum, wherein the Escherichia coli does not comprise binding sites for said RosR. In some embodiments, the heterologous transcription factor minimizes or eliminates off-target effects on endogenous regulatory regions and genes in the genetically engineered bacteria.

[0683] In some embodiments, the tunable regulatory region is a ROS-repressible regulatory region, and binding of a corresponding transcription factor represses downstream gene expression; in the presence of ROS, the transcription factor senses ROS and binds to the ROS-repressible regulatory region, thereby repressing expression of the operatively linked gene or gene cassette. In some embodiments, the ROS-sensing transcription factor is capable of binding to a regulatory region that overlaps with part of the promoter sequence. In alternate embodiments, the ROS-sensing transcription factor is capable of binding to a regulatory region that is upstream or downstream of the promoter sequence.

[0684] In some embodiments, the tunable regulatory region is a ROS-repressible regulatory region, and the transcription factor that senses ROS is PerR. In Bacillus subtilis, PerR “when bound to DNA, represses the genes coding for proteins involved in the oxidative stress response (katA, ahpC, and mrgA), metal homeostasis (hemAXCDBL, fur, and zoaA) and its own synthesis (perR)” (Marinho et al., 2014). PerR is a “global regulator that responds primarily to H202” (Dubbs et al., 2012) and “interacts with DNA at the per box, a specific palindromic consensus sequence (TTATAATNATTATAA) residing within and near the promoter sequences of PerR-controlled genes” (Marinho et al., 2014). PerR is capable of binding a regulatory region that “overlaps part of the promoter or is immediately downstream from it” (Dubbs et al., 2012). The genetically engineered bacteria of the invention may comprise any suitable ROS-responsive regulatory region from a gene that is repressed by PerR. Genes that are capable of being repressed by PerR are known in the art (see, e.g., Dubbs et al., 2012).

[0685] In these embodiments, the genetically engineered bacteria may comprise a two repressor activation regulatory circuit, which is used to express a payload. The two repressor activation regulatory circuit comprises a first ROS-sensing repressor, e.g., PerR, and a second repressor, e.g., TetR, which is operatively linked to a gene or gene cassette, e.g., a payload. In one aspect of these embodiments, the ROS-sensing repressor inhibits transcription of the second repressor, which inhibits the transcription of the gene or gene cassette. Examples of second repressors useful in these embodiments include, but are not limited to, TetR, C1, and LexA. In some embodiments, the ROS-sensing repressor is PerR. In some embodiments, the second repressor is TetR. In this embodiment, a PerR-repressible regulatory region drives expression of TetR, and a TetR-repressible regulatory region drives expression of the gene or gene cassette, e.g., a payload. In the absence of PerR binding (which occurs in the absence of ROS), tetR is transcribed, and TetR represses expression of the gene or gene cassette, e.g., a payload. In the presence of PerR binding (which occurs in the presence of ROS), tetR expression is repressed, and the gene or gene cassette, e.g., a payload, is expressed.

[0686] A ROS-responsive transcription factor may induce, derepress, or repress gene expression depending upon the regulatory region sequence used in the genetically engineered bacteria. For example, although “OxyR is primarily thought of as a transcriptional activator under oxidizing conditions . . . OxyR can function as either a repressor or activator under both oxidizing and reducing conditions” (Dubbs et al., 2012), and OxyR “has been shown to be a repressor of its own expression as well as that of fhuF (encoding a ferric ion reductase) and flu (encoding the antigen 43 outer membrane protein)” (Zheng et al., 2001). The genetically engineered bacteria of the invention may comprise any suitable ROS-responsive regulatory region from a gene that is repressed by OxyR. In some embodiments, OxyR is used in a two repressor activation regulatory circuit, as described above. Genes that are capable of being repressed by OxyR are known in the art (see, e.g., Zheng et al., 2001). Or, for example, although RosR is capable of repressing a number of genes, it is also capable of activating certain genes, e.g., the narKGHJI operon. In some embodiments, the genetically engineered bacteria comprise any suitable ROS-responsive regulatory region from a gene that is activated by RosR. In addition, “PerR-mediated positive regulation has also been observed . . . and appears to involve PerR binding to distant upstream sites” (Dubbs et al., 2012). In some embodiments, the genetically engineered bacteria comprise any suitable ROS-responsive regulatory region from a gene that is activated by PerR.

[0687] One or more types of ROS-sensing transcription factors and corresponding regulatory region sequences may be present in genetically engineered bacteria. For example, “OhrR is found in both Gram-positive and Gram-negative bacteria and can coreside with either OxyR or PerR or both” (Dubbs et al., 2012). In some embodiments, the genetically engineered bacteria comprise one type of ROS-sensing transcription factor, e.g., OxyR, and one corresponding regulatory region sequence, e.g., from oxyS. In some embodiments, the genetically engineered bacteria comprise one type of ROS-sensing transcription factor, e.g., OxyR, and two or more different corresponding regulatory region sequences, e.g., from oxyS and katG. In some embodiments, the genetically engineered bacteria comprise two or more types of ROS-sensing transcription factors, e.g., OxyR and PerR, and two or more corresponding regulatory region sequences, e.g., from oxyS and katA, respectively. One ROS-responsive regulatory region may be capable of binding more than one transcription factor. In some embodiments, the genetically engineered bacteria comprise two or more types of ROS-sensing transcription factors and one corresponding regulatory region sequence.

[0688] Nucleic acid sequences of several exemplary OxyR-regulated regulatory regions are shown in Table 22. OxyR binding sites are underlined and bolded. In some embodiments, genetically engineered bacteria comprise a nucleic acid sequence that is at least about 80%, at least about 85%, at least about 90%, at least about 95%, or at least about 99% homologous to the DNA sequence of SEQ ID NO: 197, SEQ ID NO: 198, SEQ ID NO: 199, or SEQ ID NO: 200, or a functional fragment thereof.

TABLE 22
Nucleotide sequences of exemplary OxyR-regulated regulatory
regions

| Regulatory | |
|---|---|
| sequence | Sequence |
| katG | TGTGGCTTTTATGAAAATCACACAGTGATCACAAATTTTAAACA |
| (SEQ ID | GAGCACAAAATGCTGCCTCGAAATGAGGGCGGGAAAATAAGGT |
| NO: 197) | TATCAGCCTTGTTTTCTCCCTCATTACTTGAAGGATATGAAGCTA |
| | AAACCCTTTTTTATAAAGCATTTGTCCGAATTCGGACATAATCA |
| | AAAAAGCTTAATTAAGATCAATTTGATCTACATCTCTTTAACCA |
| | ACAATATGTAAGATCTCAACTATCGCATCCGTGGATTAATTCAA |
| | TTATAACTTCTCTCTAACGCTGTGTATCGTAACGGTAACACTGTA |
| | GAGGGGAGCACATTGATGCGAATTCATTAAAGAGGAGAAAGGT |
| | ACC |
| dps | TTCCGAAAATTCCTGGCGAGCAGATAAATAAGAATTGTTCTTAT |
| (SEQ ID | CAATATATCTAACTCATTGAATCTTTATTAGTTTTGTTTTTCACG |
| NO: 198) | CTTGTTACCACTATTAGTGTGATAGGAACAGCCAGAATAGCGGA |
| | ACACATAGCCGGTGCTATACTTAATCTCGTTAATTACTGGGACA |
| | TAACATCAAGAGGATATGAAATTCGAATTCATTAAAGAGGAGA |
| | AAGGTACC |
| ahpC | GCTTAGATCAGGTGATTGCCCTTTGTTTATGAGGGTGTTGTAATC |
| (SEQ ID | CATGTCGTTGTTGCATTTGTAAGGGCAACACCTCAGCCTGCAGG |
| NO: 199) | CAGGCACTGAAGATACCAAAGGGTAGTTCAGATTACACGGTCA |
| | CCTGGAAAGGGGGCCATTTTACTTTTTATCGCCGCTGGCGGTGC |
| | AAAGTTCACAAAGTTGTCTTACGAAGGTTGTAAGGTAAAACTTA |
| | TCGATTTGATAATGGAAACGCATTAGCCGAATCGGCAAAAATTG |
| | GTTACCTTACATCTCATCGAAAACACGGAGGAAGTATAGATGCG |
| | AATTCATTAAAGAGGAGAAAGGTACC |
| oxyS | CTCGAGTTCATTATCCATCCTCCATCGCCACGATAGTTCATGGCG |
| (SEQ ID | ATAGGTAGAATAGCAATGAACGATTATCCCTATCAAGCATTCTG |
| NO: 200) | ACTGATAATTGCTCACACGAATTCATTAAAGAGGAGAAAGGTA |
| | CC |

[0689] In some embodiments, the genetically engineered bacteria of the invention comprise a gene encoding a ROS-sensing transcription factor, e.g., the oxyR gene, that is controlled by its native promoter, an inducible promoter, a promoter that is stronger than the native promoter, e.g., the GlnRS promoter or the P(Bla) promoter, or a constitutive promoter. In some instances, it may be advantageous to express the ROS-sensing transcription factor under the control of an inducible promoter in order to enhance expression stability. In some embodiments, expression of the ROS-sensing transcription factor is controlled by a different promoter than the promoter that controls expression of the therapeutic molecule. In some embodiments, expression of the ROS-sensing transcription factor is controlled by the same promoter that controls expression of the therapeutic molecule. In some embodiments, the ROS-sensing transcription factor and therapeutic molecule are divergently transcribed from a promoter region.

[0690] In some embodiments, the genetically engineered bacteria of the invention comprise a gene for a ROS-sensing transcription factor from a different species, strain, or substrain of bacteria. In some embodiments, the genetically engineered bacteria comprise a ROS-responsive regulatory region from a different species, strain, or substrain of bacteria. In some embodiments, the genetically engineered bacteria comprise a ROS-sensing transcription factor and corresponding ROS-responsive regulatory region from a different species, strain, or substrain of bacteria. The heterologous ROS-sensing transcription factor and regulatory region may increase the transcription of genes operatively linked to said regulatory region in the presence of ROS, as compared to the native transcription factor and regulatory region from bacteria of the same subtype under the same conditions.

[0691] In some embodiments, the genetically engineered bacteria comprise a ROS-sensing transcription factor, OxyR, and corresponding regulatory region, oxyS, from Escherichia coli. In some embodiments, the native ROS-sensing transcription factor, e.g., OxyR, is left intact and retains wild-type activity. In alternate embodiments, the native ROS-sensing transcription factor, e.g., OxyR, is deleted or mutated to reduce or eliminate wild-type activity.

[0692] In some embodiments, the genetically engineered bacteria of the invention comprise multiple copies of the endogenous gene encoding the ROS-sensing transcription factor, e.g., the oxyR gene. In some embodiments, the gene encoding the ROS-sensing transcription factor is present on a plasmid. In some embodiments, the gene encoding the ROS-sensing transcription factor and the gene or gene cassette for producing the therapeutic molecule are present on different plasmids. In some embodiments, the gene encoding the ROS-sensing transcription factor and the gene or gene cassette for producing the therapeutic molecule are present on the same. In some embodiments, the gene encoding the ROS-sensing transcription factor is present on a chromosome. In some embodiments, the gene encoding the ROS-sensing transcription factor and the gene or gene cassette for producing the therapeutic molecule are present on different chromosomes. In some embodiments, the gene encoding the ROS-sensing transcription factor and the gene or gene cassette for producing the therapeutic molecule are present on the same chromosome.

[0693] In some embodiments, the genetically engineered bacteria comprise a wild-type gene encoding a ROS-sensing transcription factor, e.g., the soxR gene, and a corresponding regulatory region, e.g., a soxS regulatory region, that is mutated relative to the wild-type regulatory region from bacteria of the same subtype. The mutated regulatory region increases the expression of the payload in the presence of ROS, as compared to the wild-type regulatory region under the same conditions. In some embodiments, the genetically engineered bacteria comprise a wild-type ROS-responsive regulatory region, e.g., the oxyS regulatory region, and a corresponding transcription factor, e.g., OxyR, that is mutated relative to the wild-type transcription factor from bacteria of the same subtype. The mutant transcription factor increases the expression of the payload in the presence of ROS, as compared to the wild-type transcription factor under the same conditions. In some embodiments, both the ROS-sensing transcription factor and corresponding regulatory region are mutated relative to the wild-type sequences from bacteria of the same subtype in order to increase expression of the payload in the presence of ROS.

[0694] In some embodiments, the gene or gene cassette for producing the payload is present on a plasmid and operably linked to a promoter that is induced by ROS. In some embodiments, the gene or gene cassette for producing the payload is present in the chromosome and operably linked to a promoter that is induced by ROS. In some embodiments, the gene or gene cassette for producing the payload is present on a chromosome and operably linked to a promoter that is induced by exposure to tetracycline. In some embodiments, the gene or gene cassette for producing the payload is present on a plasmid and operably linked to a promoter that is induced by exposure to tetracycline. In some embodiments, expression is further optimized by methods known in the art, e.g., by optimizing ribosomal binding sites, manipulating transcriptional regulators, and/or increasing mRNA stability.

[0695] In some embodiments, the genetically engineered bacteria may comprise multiple copies of the gene(s) capable of producing a payload(s). In some embodiments, the gene(s) capable of producing a payload(s) is present on a plasmid and operatively linked to a ROS-responsive regulatory region. In some embodiments, the gene(s) capable of producing a payload is present in a chromosome and operatively linked to a ROS-responsive regulatory region.

[0696] Thus, in some embodiments, the genetically engineered bacteria or genetically engineered virus produce one or more payloads under the control of an oxygen level-dependent promoter, a reactive oxygen species (ROS)-dependent promoter, or a reactive nitrogen species (RNS)-dependent promoter, and a corresponding transcription factor.

[0697] In some embodiments, the genetically engineered bacteria comprise a stably maintained plasmid or chromosome carrying a gene for producing a payload, such that the payload can be expressed in the host cell, and the host cell is capable of survival and/or growth in vitro, e.g., in medium, and/or in vivo. In some embodiments, a bacterium may comprise multiple copies of the gene encoding the payload. In some embodiments, the gene encoding the payload is expressed on a low-copy plasmid. In some embodiments, the low-copy plasmid may be useful for increasing stability of expression. In some embodiments, the low-copy plasmid may be useful for decreasing leaky expression under non-inducing conditions. In some embodiments, the gene encoding the payload is expressed on a high-copy plasmid. In some embodiments, the high-copy plasmid may be useful for increasing expression of the payload. In some embodiments, the gene encoding the payload is expressed on a chromosome.

### Propionate and Other Promoters

[0698] In some embodiments, the genetically engineered bacteria comprise the gene or gene cassette for producing the metabolic and/or satiety effector and/or immune modulator molecule expressed under the control of an inducible promoter that is responsive to specific molecules or metabolites in the environment, e.g., the mammalian gut. For example, the short-chain fatty acid propionate is a major microbial fermentation metabolite localized to the gut (Hosseini et al., 2011). In one embodiment, the gene or gene cassette for producing the metabolic and/or satiety effector and/or immune modulator molecule is under the control of a propionate-inducible promoter. In a more specific embodiment, the gene or gene cassette for producing the metabolic and/or satiety effector and/or immune modulator molecule is under the control of a propionate-inducible promoter that is activated by the presence of propionate in the mammalian gut. Any molecule or metabolite found in the mammalian gut, in a healthy and/or disease state, may be used to induce payload expression. Non-limiting examples of inducers include propionate, bilirubin, aspartate aminotransferase, alanine aminotransferase, blood coagulation factors II, VII, IX, and X, alkaline phosphatase, gamma glutamyl transferase, hepatitis antigens and antibodies, alpha fetoprotein, anti-mitochondrial, smooth muscle, and anti-nuclear antibodies, iron, transferrin, ferritin, copper, ceruloplasmin, ammonia, and manganese. In alternate embodiments, the gene or gene cassette for producing the metabolic and/or satiety effector and/or immune modulator molecule and/or immune modulator is under the control of a pBAD promoter, which is activated in the presence of the sugar arabinose.

[0699] In some embodiments, the gene or gene cassette for producing the metabolic and/or satiety effector and/or immune modulator molecule is present on a plasmid and operably linked to a promoter that is induced under low-oxygen or anaerobic conditions. In some embodiments, the gene or gene cassette for producing the metabolic and/or satiety effector and/or immune modulator molecule is present in the chromosome and operably linked to a promoter that is induced under low-oxygen or anaerobic conditions. In some embodiments, the gene or gene cassette for producing the metabolic and/or satiety effector and/or immune modulator molecule is present on a plasmid and operably linked to a promoter that is induced by molecules or metabolites that are specific to the mammalian gut. In some embodiments, the gene or gene cassette for producing the metabolic and/or satiety effector and/or immune modulator molecule is present on a chromosome and operably linked to a promoter that is induced by molecules or metabolites that are specific to the mammalian gut. In some embodiments, the gene or gene cassette for producing the metabolic and/or satiety effector and/or immune modulator molecule is present on a chromosome and operably linked to a promoter that is induced by exposure to tetracycline. In some embodiments, the gene or gene cassette for producing the metabolic and/or satiety effector and/or immune modulator molecule is present on a plasmid and operably linked to a promoter that is induced by exposure to tetracycline. In some embodiments, expression is further optimized by methods known in the art, e.g., by optimizing ribosomal binding sites, manipulating transcriptional regulators, and/or increasing mRNA stability.

[0700] In some embodiments, the genetically engineered bacteria comprise a stably maintained plasmid or chromosome carrying the gene or gene cassette for producing the metabolic and/or satiety effector and/or immune modulator molecule, such that the gene or gene cassette can be expressed in the host cell, and the host cell is capable of survival and/or growth in vitro, e.g., in medium, and/or in vivo, e.g., in the gut. In some embodiments, a bacterium may comprise multiple copies of the gene or gene cassette for producing the metabolic and/or satiety effector and/or immune modulator molecule. In some embodiments, gene or gene cassette for producing the payload is expressed on a low-copy plasmid. In some embodiments, the low-copy plasmid may be useful for increasing stability of expression. In some embodiments, the low-copy plasmid may be useful for decreasing leaky expression under non-inducing conditions. In some embodiments, gene or gene cassette for producing the metabolic and/or satiety effector and/or immune modulator molecule is expressed on a high-copy plasmid. In some embodiments, the high-copy plasmid may be useful for increasing gene or gene cassette expression. In some embodiments, gene or gene cassette for producing the metabolic and/or satiety effector and/or immune modulator molecule is expressed on a chromosome.

[0701] Table 23 lists a propionate promoter sequence. In some embodiments, the propionate promoter is induced in the mammalian gut.

TABLE 23
Propionate promoter sequence

| Description | Sequence |
|---|---|
| Prp (Propionate) | TTACCCGTCTGGATTTTCAGTACGCGCTTTTAAACGACGCCA |
| promoter | CAGCGTGGTACGGCTGATCCCCAAATAACGTGCGGCGGCGCG |
| Bold: prpR | CTTATCGCCATTAAAGCGTGCGAGCACCTCCTGCAATGGAAG |
| Lower case: | CGCTTCTGCTGACGAGGGCGTGATTTCTGCTGTGGTCCCCAC |
| ribosome binding | CAGTTCAGGTAATAATTGCCGCATAAATTGTCTGTCCAGTGT |
| site | TGGTGCGGGATCGACGCTTAAAAAAAGCGCCAGGCGTTCCAT |
| ATG underlined: | CATATTCCGCAGTTCGCGAATATTACCGGGCCAATGATAGTT |
| start of gene of | CAGTAGAAGCGGCTGACACTGCGTCAGCCCATGACGCACCGA |
| interest | TTCGGTAAAAGGGATCTCCATCGCGGCCAGCGATTGTTTTAA |
| SEQ ID NO: 201 | AAAGTTTTCCGCCAGAGGCAGAATATCAGGCTGTCGCTCGCG |
| | CAAGGGGGGAAGCGGCAGACGCAGAATGCTCAAACGGTAAAA |
| | CAGATCGGTACGAAAACGTCCTTGCGTTATCTCCCGATCCAG |
| | ATCGCAATGCGTGGCGCTGATCACCCGGACATCTACCGGGAT |
| | CGGCTGATGCCCGCCAACGCGGGTGACGGCTTTTTCCTCCAG |
| | TACGCGTAGAAGGCGGGTTTGTAACGGCAGCGGCATTTCGCC |
| | AATTTCGTCAAGAAACAGCGTGCCGCCGTGGGCGACCTCAAA |
| | CAGCCCCGCACGTCCACCTCGTCTTGAGCCGGTAAACGCTCC |
| | CTCCTCATAGCCAAACAGTTCAGCCTCCAGCAACGACTCGGT |
| | AATCGCGCCGCAATTAACGGCGACAAAGGGCGGAGAAGGCTT |
| | GTTCTGACGGTGGGGCTGACGGTTAAACAACGCCTGATGAAT |
| | CGCTTGCGCCGCCAGCTCTTTCCCGGTCCCTGTTTCCCCCTG |
| | AATCAGCACTGCCGCGCGGGAACGGGCATAGAGTGTAATCGT |
| | ATGGCGAACCTGCTCCATTTGTGGTGAATCGCCGAGGATATC |
| | GCTCAGCGCATAACGGGTCTGTAATCCCTTGCTGGAGGTATG |
| | CTGGCTATACTGACGCCGTGTCAGGCGGGTCATATCCAGCGC |
| | ATCATGGAAAGCCTGACGTACGGTGGCCGCTGAATAAATAAA |
| | GATGGCGGTCATTCCTGCCTCTTCCGCCAGGTCGGTAATTAG |
| | TCCTGCCCCAATTACAGCCTCAATGCCGTTAGCTTTGAGCTC |
| | GTTAATTTGCCCGCGAGCATCCTCTTCAGTGATATAGCTTCG |
| | CTGTTCAAGACGGAGGTGAAACGTTTTCTGAAAGGCGACCAG |
| | AGCCGGAATGGTCTCCTGATAGGTCACGATTCCCATTGAGGA |
| | AGTCAGCTTTCCCGCTTTTGCCAGAGCCTGTAATACATCGAA |
| | TCCGCTGGGTTTGATGAGGATGACAGGTACCGACAGTCGGCT |
| | TTTTAAATAAGCGCCGTTGGAACCTGCCGCGATAATCGCGTC |
| | GCAGCGTTCGGTTGCCAGTTTTTTGCGAATGTAGGCTACTGC |
| | CTTTTCAAAACCGAGCTGAATAGGCGTGATCGTCGCCAGATG |
| | ATCAAACTCCAGGCTGATATCCCGAAATAGTTCGAACAGGCG |
| | CGTTACCGAGACCGTCCAGATCACCGGTTTATCGCTATTATC |
| | GCGCGAAGCGCTATGCACAGTAACCATCGTCGTAGATTCATG |
| | TTTAAGGAACGAATTCTTGTTTTATAGATGTTTCGTTAATGT |
| | TGCAATGAAACACAGGCCTCCGTTTCATGAAACGTTAGCTGA |
| | CTCGTTTTTCTTGTGACTCGTCTGTCAGTATTAAAAAAGATT |
| | TTTCATTTAACTGATTGTTTTTAAATTGAATTTTATTTAATG |
| | GTTTCTCGGTTTTTGGGTCTGGCATATCCCTTGCTTTAATGA |
| | GTGCATCTTAATTAACAATTCAATAACAAGAGGGCTGAATag |
| | taatttcaacaaaataacgagcattcgaatg |

[0702] Other Inducible Promoters

[0703] In some embodiments, the genetically engineered bacteria comprise one or more gene sequence(s) which are inducible through an arabinose inducible system. The genes of arabinose metabolism are organized in one operon, AraBAD, which is controlled by the PAraBAD promoter. The PAraBAD (or Para) promoter suitably fulfills the criteria of inducible expression systems. PAraBAD displays tighter control of payload gene expression than many other systems, likely due to the dual regulatory role of AraC, which functions both as an inducer and as a repressor. Additionally, the level of ParaBAD-based expression can be modulated over a wide range of L-arabinose concentrations to fine-tune levels of expression of the payload. However, the cell population exposed to sub-saturating L-arabinose concentrations is divided into two subpopulations of induced and uninduced cells, which is determined by the differences between individual cells in the availability of L-arabinose transporter (Zhang et al., Development and Application of an Arabinose-Inducible Expression System by Facilitating Inducer Uptake in Corynebacterium glutamicum; Appl. Environ. Microbiol. August 2012 vol. 78 no. 16 5831-5838). Alternatively, inducible expression from the ParaBad can be controlled or fine-tuned through the optimization of the ribosome binding site (RBS), as described herein. An exemplary construct is depicted in FIG. 79.

[0704] In one embodiment, expression of one or more protein(s) of interest, e.g., one or more therapeutic polypeptide(s), is driven directly or indirectly by one or more arabinose inducible promoter(s).

[0705] In some embodiments, the arabinose inducible promoter is useful for or induced during in vivo expression of the one or more protein(s) of interest. In some embodiments, expression of one or more protein(s) of interest is driven directly or indirectly by one or more arabinose inducible promoter(s) in vivo. In some embodiments, the promoter is directly or indirectly induced by a molecule that is co-administered with the genetically engineered bacteria of the invention, e.g., arabinose.

[0706] In some embodiments, expression of one or more protein(s) of interest, is driven directly or indirectly by one or more arabinose inducible promoter(s) during in vitro growth, preparation, or manufacturing of the strain prior to in vivo administration. In some embodiments, the arabinose inducible promoter(s) are induced in culture, e.g., grown in a flask, fermenter or other appropriate culture vessel, e.g., used during cell growth, cell expansion, fermentation, recovery, purification, formulation, and/or manufacture. In some embodiments, the promoter is directly or indirectly induced by a molecule that is added to in the bacterial culture to induce expression and pre-load the bacterium with the payload prior to administration, e.g., arabinose. In some embodiments, the cultures, which are induced by arabinose, are grown arerobically. In some embodiments, the cultures, which are induced by arabinose, are grown anaerobically.

[0707] In one embodiment, the arabinose inducible promoter drives the expression of a construct comprising one or more protein(s) of interest, jointly with a second promoter, e.g., a second constitutive or inducible promoter. In some embodiments, two promoters are positioned proximally to the construct and drive its expression, wherein the arabinose inducible promoter drives expression under a first set of exogenous conditions, and the second promoter drives the expression under a second set of exogenous conditions. In a non-limiting example, the first and second conditions may be two sequential culture conditions (i.e., during preparation of the culture in a flask, fermenter or other appropriate culture vessel, e.g., arabinose and IPTG). In another non-limiting example, the first inducing conditions may be culture conditions, e.g., including arabinose presence, and the second inducing conditions may be in vivo conditions. Such in vivo conditions include low-oxygen, microaerobic, or anaerobic conditions, presence of gut metabolites, and/or metabolites administered in combination with the bacterial strain. In some embodiments, the one or more arabinose promoters drive expression of one or more protein(s) of interest, in combination with the FNR promoter driving the expression of the same gene sequence(s).

[0708] In some embodiments, the arabinose inducible promoter drives the expression of one or more protein(s) of interest from a low-copy plasmid or a high copy plasmid or a biosafety system plasmid described herein. In some embodiments, the arabinose inducible promoter drives the expression of one or more protein(s) of interest from a construct which is integrated into the bacterial chromosome. Exemplary insertion sites are described herein.

[0709] In some embodiments, one or more protein(s) of interest are knocked into the arabinose operon and are driven by the native arabinose inducible promoter

[0710] In some embodiments, the genetically engineered bacteria comprise one or more gene sequence(s) having at least 80%, 81%, 82%, 83%, 84%, 85%, 86%, 87%, 88%, 89%, 90%, 91%, 92%, 93%, 94%, 95%,96%, 97%, 98%, or 99% identity with any of the sequences of SEQ ID NO: 202. In some embodiments, the arabinose inducible construct further comprises a gene encoding AraC, which is divergently transcribed from the same promoter as the one or more one or more protein(s) of interest. In some embodiments, the genetically engineered bacteria comprise one or more gene sequence(s) having at least 80%, 81%, 82%, 83%, 84%, 85%, 86%, 87%, 88%, 89%, 90%, 91%, 92%, 93%, 94%, 95%,96%, 97%, 98%, or 99% identity with any of the sequences of SEQ ID NO: 203. In some embodiments, the genetically engineered bacteria comprise one or more gene sequence(s) encoding a polypeptide having at least 80%, 81%, 82%, 83%, 84%, 85%, 86%, 87%, 88%, 89%, 90%, 91%, 92%, 93%, 94%, 95%,96%, 97%, 98%, or 99% identity with the polypeptide encoded by any of the sequences of SEQ ID NO: 204.

[0711] In some embodiments, the genetically engineered bacteria comprise one or more gene sequence(s) which are inducible through a rhamnose inducible system. The genes rhaBAD are organized in one operon which is controlled by the rhaP BAD promoter. The rhaP BAD promoter is regulated by two activators, RhaS and RhaR, and the corresponding genes belong to one transcription unit which divergently transcribed in the opposite direction of rhaBAD. In the presence of L-rhamnose, RhaR binds to the rhaP RS promoter and activates the production of RhaR and RhaS. RhaS together with L-rhamnose then bind to the rhaP BAD and the rhaP T promoter and activate the transcription of the structural genes. In contrast to the arabinose system, in which AraC is provided and divergently transcribed in the gene sequence(s), it is not necessary to express the regulatory proteins in larger quantities in the rhamnose expression system because the amounts expressed from the chromosome are sufficient to activate transcription even on multi-copy plasmids. Therefore, only the rhaP BAD promoter is cloned upstream of the gene that is to be expressed. Full induction of rhaBAD transcription also requires binding of the CRP-cAMP complex, which is a key regulator of catabolite repression. Alternatively, inducible expression from the rhaBAD can be controlled or fine-tuned through the optimization of the ribosome binding site (RBS), as described herein. An exemplary construct is depicted in FIG. 82B (construct for PAL expression under the control of a rhamnose inducible promoter).

[0712] In one embodiment, expression of one or more protein(s) of interest is driven directly or indirectly by one or more rhamnose inducible promoter(s). In one embodiment, expression of the payload is driven directly or indirectly by a rhamnose inducible promoter.

[0713] In some embodiments, the rhamnose inducible promoter is useful for or induced during in vivo expression of the one or more protein(s) of interest. In some embodiments, expression of one or more protein(s) of interest is driven directly or indirectly by one or more rhamnose inducible promoter(s) in vivo. In some embodiments, the promoter is directly or indirectly induced by a molecule that is co-administered with the genetically engineered bacteria of the invention, e.g., rhamnose

[0714] In some embodiments, expression of one or more protein(s) of interest, is driven directly or indirectly by one or more rhamnose inducible promoter(s) during in vitro growth, preparation, or manufacturing of the strain prior to in vivo administration. In some embodiments, the rhamnose inducible promoter(s) are induced in culture, e.g., grown in a flask, fermenter or other appropriate culture vessel, e.g., used during cell growth, cell expansion, fermentation, recovery, purification, formulation, and/or manufacture. In some embodiments, the promoter is directly or indirectly induced by a molecule that is added to in the bacterial culture to induce expression and pre-load the bacterium with the payload prior to administration, e.g., rhamnose. In some embodiments, the cultures, which are induced by rhamnose, are grown arerobically. In some embodiments, the cultures, which are induced by rhamnose, are grown anaerobically.

[0715] In one embodiment, the rhamnose inducible promoter drives the expression of a construct comprising one or more protein(s) of interest jointly with a second promoter, e.g., a second constitutive or inducible promoter. In some embodiments, two promoters are positioned proximally to the construct and drive its expression, wherein the rhamnose inducible promoter drives expression under a first set of exogenous conditions, and the second promoter drives the expression under a second set of exogenous conditions. In a non-limiting example, the first and second conditions may be two sequential culture conditions (i.e., during preparation of the culture in a flask, fermenter or other appropriate culture vessel, e.g., rhamnose and arabinose). In another non-limiting example, the first inducing conditions may be culture conditions, e.g., including rhamnose presence, and the second inducing conditions may be in vivo conditions. Such in vivo conditions include low-oxygen, microaerobic, or anaerobic conditions, presence of gut metabolites, and/or metabolites administered in combination with the bacterial strain. In some embodiments, the one or more rhamnose promoters drive expression of one or more protein(s) of interest and/or transcriptional regulator(s), e.g., FNRS24Y, in combination with the FNR promoter driving the expression of the same gene sequence(s).

[0716] In some embodiments, the rhamnose inducible promoter drives the expression of one or more protein(s) of interest , from a low-copy plasmid or a high copy plasmid or a biosafety system plasmid described herein. In some embodiments, the rhamnose inducible promoter drives the expression of one or more protein(s) of interest , from a construct which is integrated into the bacterial chromosome. Exemplary insertion sites are described herein.

[0717] In some embodiments, the genetically engineered bacteria comprise one or more gene sequence(s) having at least 80%, 81%, 82%, 83%, 84%, 85%, 86%, 87%, 88%, 89%, 90%, 91%, 92%, 93%, 94%, 95%,96%, 97%, 98%, or 99% identity with any of the sequences of SEQ ID NO: 205.

[0718] In some embodiments, the genetically engineered bacteria comprise one or more gene sequence(s) which are inducible through an Isopropyl β-D-1-thiogalactopyranoside (IPTG) inducible system or other compound which induced transcription from the Lac Promoter. IPTG is a molecular mimic of allolactose, a lactose metabolite that activates transcription of the lac operon. In contrast to allolactose, the sulfur atom in IPTG creates a non-hydrolyzable chemical blond, which prevents the degradation of IPTG, allowing the concentration to remain constant. IPTG binds to the lac repressor and releases the tetrameric repressor (lacI) from the lac operator in an allosteric manner, thereby allowing the transcription of genes in the lac operon. Since IPTG is not metabolized by E. coli , its concentration stays constant and the rate of expression of Lac promoter-controlled is tightly controlled, both in vivo and in vitro. IPTG intake is independent on the action of lactose permease, since other transport pathways are also involved. Inducible expression from the PLac can be controlled or fine-tuned through the optimization of the ribosome binding site (RBS), as described herein. Other compounds which inactivate LacI, can be used instead of IPTG in a similar manner.

[0719] In one embodiment, expression of one or more protein(s) of interest is driven directly or indirectly by one or more IPTG inducible promoter(s).

[0720] In some embodiments, the IPTG inducible promoter is useful for or induced during in vivo expression of the one or more protein(s) of interest. In some embodiments, expression of one or more protein(s) of interest is driven directly or indirectly by one or more IPTG inducible promoter(s) in vivo. In some embodiments, the promoter is directly or indirectly induced by a molecule that is co-administered with the genetically engineered bacteria of the invention, e.g., IPTG.

[0721] In some embodiments, expression of one or more protein(s) of interest is driven directly or indirectly by one or more IPTG inducible promoter(s) during in vitro growth, preparation, or manufacturing of the strain prior to in vivo administration. In some embodiments, the IPTG inducible promoter(s) are induced in culture, e.g., grown in a flask, fermenter or other appropriate culture vessel, e.g., used during cell growth, cell expansion, fermentation, recovery, purification, formulation, and/or manufacture. In some embodiments, the promoter is directly or indirectly induced by a molecule that is added to in the bacterial culture to induce expression and pre-load the bacterium with the payload prior to administration, e.g., IPTG. In some embodiments, the cultures, which are induced by IPTG, are grown arerobically. In some embodiments, the cultures, which are induced by IPTG, are grown anaerobically.

[0722] In one embodiment, the IPTG inducible promoter drives the expression of a construct comprising one or more protein(s) of interest jointly with a second promoter, e.g., a second constitutive or inducible promoter. In some embodiments, two promoters are positioned proximally to the construct and drive its expression, wherein the IPTG inducible promoter drives expression under a first set of exogenous conditions, and the second promoter drives the expression under a second set of exogenous conditions. In a non-limiting example, the first and second conditions may be two sequential culture conditions (i.e., during preparation of the culture in a flask, fermenter or other appropriate culture vessel, e.g., arabinose and IPTG). In another non-limiting example, the first inducing conditions may be culture conditions, e.g., including IPTG presence, and the second inducing conditions may be in vivo conditions. Such in vivo conditions include low-oxygen, microaerobic, or anaerobic conditions, presence of gut metabolites, and/or metabolites administered in combination with the bacterial strain. In some embodiments, the one or more IPTG inducible promoters drive expression of one or more protein(s) of interest in combination with the FNR promoter driving the expression of the same gene sequence(s).

[0723] In some embodiments, the IPTG inducible promoter drives the expression of one or more protein(s) of interest from a low-copy plasmid or a high copy plasmid or a biosafety system plasmid described herein. In some embodiments, the IPTG inducible promoter drives the expression of one or more protein(s) of interest from a construct which is integrated into the bacterial chromosome. Exemplary insertion sites are described herein.

[0724] In some embodiments, the genetically engineered bacteria comprise one or more gene sequence(s) having at least 80%, 81%, 82%, 83%, 84%, 85%, 86%, 87%, 88%, 89%, 90%, 91%, 92%, 93%, 94%, 95%,96%, 97%, 98%, or 99% identity with any of the sequences of SEQ ID NO: 206. In some embodiments, the IPTG inducible construct further comprises a gene encoding lacI, which is divergently transcribed from the same promoter as the one or more one or more protein(s) of interest. In some embodiments, the genetically engineered bacteria comprise one or more gene sequence(s) having at least 80%, 81%, 82%, 83%, 84%, 85%, 86%, 87%, 88%, 89%, 90%, 91%, 92%, 93%, 94%, 95%,96%, 97%, 98%, or 99% identity with any of the sequences of SEQ ID NO: 207. In some embodiments, the genetically engineered bacteria comprise one or more gene sequence(s) encoding a polypeptide having at least 80%, 81%, 82%, 83%, 84%, 85%, 86%, 87%, 88%, 89%, 90%, 91%, 92%, 93%, 94%, 95%,96%, 97%, 98%, or 99% identity with the polypeptide encoded by any of the sequences of SEQ ID NO: 208.

[0725] In some embodiments, the genetically engineered bacteria comprise one or more gene sequence(s) which are inducible through a tetracycline inducible system. The initial system Gossen and Bujard (Tight control of gene expression in mammalian cells by tetracycline-responsive promoters. Gossen M & Bujard H. PNAS. 1992 Jun. 15; 89(12):5547-51) developed is known as tetracycline off: in the presence of tetracycline, expression from a tet-inducible promoter is reduced. Tetracycline-controlled transactivator (tTA) was created by fusing tetR with the C-terminal domain of VP16 (virion protein 16) from herpes simplex virus.In the absence of tetracycline, the tetR portion of tTA will bind tetO sequences in the tet promoter, and the activation domain promotes expression. In the presence of tetracycline, tetracycline binds to tetR, precluding tTA from binding to the tetO sequences. Next, a reverse Tet repressor (rTetR), was developed which created a reliance on the presence of tetracycline for induction, rather than repression. The new transactivator rtTA (reverse tetracycline-controlled transactivator) was created by fusing rTetR with VP16. The tetracycline on system is also known as the rtTA-dependent system.

[0726] In one embodiment, expression of one or more protein(s) of interest is driven directly or indirectly by one or more tetracycline inducible promoter(s). In one embodiment, expression of PAL is driven directly or indirectly by a tetracycline inducible promoter.

[0727] In some embodiments, the tetracycline inducible promoter is useful for or induced during in vivo expression of the one or more protein(s) of interest. In some embodiments, expression of one or more protein(s) of interest and/or transcriptional regulator(s), e.g., FNRS24Y, is driven directly or indirectly by one or more tetracycline inducible promoter(s) in vivo. In some embodiments, the promoter is directly or indirectly induced by a molecule that is co-administered with the genetically engineered bacteria of the invention, e.g., tetracycline

[0728] In some embodiments, expression of one or more protein(s) of interest is driven directly or indirectly by one or more tetracycline inducible promoter(s) during in vitro growth, preparation, or manufacturing of the strain prior to in vivo administration. In some embodiments, the tetracycline inducible promoter(s) are induced in culture, e.g., grown in a flask, fermenter or other appropriate culture vessel, e.g., used during cell growth, cell expansion, fermentation, recovery, purification, formulation, and/or manufacture. In some embodiments, the promoter is directly or indirectly induced by a molecule that is added to in the bacterial culture to induce expression and pre-load the bacterium with the payload prior to administration, e.g., tetracycline. In some embodiments, the cultures, which are induced by tetracycline, are grown arerobically. In some embodiments, the cultures, which are induced by tetracycline, are grown anaerobically.

[0729] In one embodiment, the tetracycline inducible promoter drives the expression of a construct comprising one or more protein(s) of interest jointly with a second promoter, e.g., a second constitutive or inducible promoter. In some embodiments, two promoters are positioned proximally to the construct and drive its expression, wherein the tetracycline inducible promoter drives expression under a first set of exogenous conditions, and the second promoter drives the expression under a second set of exogenous conditions. In a non-limiting example, the first and second conditions may be two sequential culture conditions (i.e., during preparation of the culture in a flask, fermenter or other appropriate culture vessel, e.g., tetracycline and IPTG). In another non-limiting example, the first inducing conditions may be culture conditions, e.g., including tetracycline presence, and the second inducing conditions may be in vivo conditions. Such in vivo conditions include low-oxygen, microaerobic, or anaerobic conditions, presence of gut metabolites, and/or metabolites administered in combination with the bacterial strain. In some embodiments, the one or more tetracycline promoters drive expression of one or more protein(s) of interest in combination with the FNR promoter driving the expression of the same gene sequence(s).

[0730] In some embodiments, the tetracycline inducible promoter drives the expression of one or more protein(s) of interest from a low-copy plasmid or a high copy plasmid or a biosafety system plasmid described herein. In some embodiments, the tetracycline inducible promoter drives the expression of one or more protein(s) of interest from a construct which is integrated into the bacterial chromosome. Exemplary insertion sites are described herein.

[0731] In some embodiments, the genetically engineered bacteria comprise one or more gene sequence(s) having at least 80%, 81%, 82%, 83%, 84%, 85%, 86%, 87%, 88%, 89%, 90%, 91%, 92%, 93%, 94%, 95%,96%, 97%, 98%, or 99% identity with any of the bolded sequences of SEQ ID NO: 213 (tet promoter is in bold). In some embodiments, the tetracycline inducible construct further comprises a gene encoding AraC, which is divergently transcribed from the same promoter as the one or more one or more protein(s) of interest In some embodiments, the genetically engineered bacteria comprise one or more gene sequence(s) having at least 80%, 81%, 82%, 83%, 84%, 85%, 86%, 87%, 88%, 89%, 90%, 91%, 92%, 93%, 94%, 95%,96%, 97%, 98%, or 99% identity with any of the sequences of SEQ ID NO: 213 in italics (Tet repressor is in italics). In some embodiments, the genetically engineered bacteria comprise one or more gene sequence(s) encoding a polypeptide having at least 80%, 81%, 82%, 83%, 84%, 85%, 86%, 87%, 88%, 89%, 90%, 91%, 92%, 93%, 94%, 95%,96%, 97%, 98%, or 99% identity with the polypeptide encoded by any of the sequences of SEQ ID NO: 213 in italics (Tet repressor is in italics).

[0732] In some embodiments, the genetically engineered bacteria comprise one or more gene sequence(s) whose expression is controlled by a temperature sensitive mechanism. Thermoregulators are advantageous because of strong transcriptional control without the use of external chemicals or specialized media (see, e.g., Nemani et al., Magnetic nanoparticle hyperthermia induced cytosine deaminase expression in microencapsulated E. coli for enzyme-prodrug therapy; J Biotechnol. 2015 Jun. 10; 203: 32-40, and references therein). Thermoregulated protein expression using the mutant c1857 repressor and the pL and/or pR phage promoters have been used to engineer recombinant bacterial strains. The gene of interest cloned downstream of the 2\, promoters can then be efficiently regulated by the mutant thermolabile c1857 repressor of bacteriophage λ. At temperatures below 37° C., cI857 binds to the oL or oR regions of the pR promoter and blocks transcription by RNA polymerase. At higher temperatures, the functional cI857 dimer is destabilized, binding to the oL or oR DNA sequences is abrogated, and mRNA transcription is initiated. An exemplary construct is depicted in FIG. 82A. Inducible expression from the ParaBad can be controlled or further fine-tuned through the optimization of the ribosome binding site (RBS), as described herein.

[0733] In one embodiment, expression of one or more protein(s) of interest is driven directly or indirectly by one or more thermoregulated promoter(s). In one embodiment, expression of PAL is driven directly or indirectly by a thermoregulated promoter.

[0734] In some embodiments, the thermoregulated promoter is useful for or induced during in vivo expression of the one or more protein(s) of interest. In some embodiments, expression of one or more protein(s) of interest is driven directly or indirectly by one or more thermoregulated promoter(s) in vivo. In some embodiments, the promoter is directly or indirectly induced by a molecule that is co-administered with the genetically engineered bacteria of the invention, e.g., temperature.

[0735] In some embodiments, expression of one or more protein(s) of interest is driven directly or indirectly by one or more thermoregulated promoter(s) during in vitro growth, preparation, or manufacturing of the strain prior to in vivo administration. In some embodiments, it may be advantageous to shup off production of the one or more protein(s) of interest. This can be done in a thermoregulated system by growing the strain at lower temperatures, e.g., 30 C. Expression can then be induced by elevating the temperature to 37 C and/or 42 C. In some embodiments, the thermoregulated promoter(s) are induced in culture, e.g., grown in a flask, fermenter or other appropriate culture vessel, e.g., used during cell growth, cell expansion, fermentation, recovery, purification, formulation, and/or manufacture. In some embodiments, the cultures, which are induced by temperatures between 37 C and 42 C, are grown arerobically. In some embodiments, the cultures, which are induced by induced by temperatures between 37 C and 42 C, are grown anaerobically.

[0736] In one embodiment, the thermoregulated promoter drives the expression of a construct comprising one or more protein(s) of interest jointly with a second promoter, e.g., a second constitutive or inducible promoter. In some embodiments, two promoters are positioned proximally to the construct and drive its expression, wherein the thermoregulated promoter drives expression under a first set of exogenous conditions, and the second promoter drives the expression under a second set of exogenous conditions. In a non-limiting example, the first and second conditions may be two sequential culture conditions (i.e., during preparation of the culture in a flask, fermenter or other appropriate culture vessel, e.g., thermoregulation and arabino se). In another non-limiting example, the first inducing conditions may be culture conditions, e.g., permissive temperature, and the second inducing conditions may be in vivo conditions. Such in vivo conditions include low-oxygen, microaerobic, or anaerobic conditions, presence of gut metabolites, and/or metabolites administered in combination with the bacterial strain. In some embodiments, the one or more thermoregulated promoters drive expression of one or more protein(s) of interest in combination with the FNR promoter driving the expression of the same gene sequence(s).

[0737] In some embodiments, the thermoregulated promoter drives the expression of one or more protein(s) of interest from a low-copy plasmid or a high copy plasmid or a biosafety system plasmid described herein. In some embodiments, the thermoregulated promoter drives the expression of one or more protein(s) of interest from a construct which is integrated into the bacterial chromosome. Exemplary insertion sites are described herein.

[0738] In some embodiments, the genetically engineered bacteria comprise one or more gene sequence(s) having at least 80%, 81%, 82%, 83%, 84%, 85%, 86%, 87%, 88%, 89%, 90%, 91%, 92%, 93%, 94%, 95%,96%, 97%, 98%, or 99% identity with any of the sequences of SEQ ID NO: 209. In some embodiments, the thermoregulated construct further comprises a gene encoding mutant cI857 repressor, which is divergently transcribed from the same promoter as the one or more one or more protein(s) of interest . In some embodiments, the genetically engineered bacteria comprise one or more gene sequence(s) having at least 80%, 81%, 82%, 83%, 84%, 85%, 86%, 87%, 88%, 89%, 90%, 91%, 92%, 93%, 94%, 95%,96%, 97%, 98%, or 99% identity with any of the sequences of SEQ ID NO: 210. In some embodiments, the genetically engineered bacteria comprise one or more gene sequence(s) encoding a polypeptide having at least 80%, 81%, 82%, 83%, 84%, 85%, 86%, 87%, 88%, 89%, 90%, 91%, 92%, 93%, 94%, 95%,96%, 97%, 98%, or 99% identity with the polypeptide encoded by any of the sequences of SEQ ID NO: 212.

[0739] In some embodiments, the genetically engineered bacteria comprise one or more gene sequence(s) which are indirectly inducible through a system driven by the PssB promoter. The Pssb promoter is active under aerobic conditions, and shuts off under anaerobic conditions.

[0740] This promoter can be used to express a gene of interest under aerobic conditions. This promoter can also be used to tightly control the expression of a gene product such that it is only expressed under anaerobic conditions. In this case, the oxygen induced PssB promoter induces the expression of a repressor, which represses the expression of a gene of interest. As a result, the gene of interest is only expressed in the absence of the repressor, i.e., under anaerobic conditions. This strategy has the advantage of an additional level of control for improved fine-tuning and tighter control. FIG. 83A depicts a schematic of the gene organization of a PssB promoter.

[0741] In one embodiment, expression of one or more protein(s) of interest is indirectly regulated by a repressor expressed under the control of one or more PssB promoter(s).

[0742] In some embodiments, induction of the RssB promoter(s) indirectly drives the in vivo expression of one or more protein(s) of interest. In some embodiments, induction of the RssB promoter(s) indirectly drives the expression of one or more protein(s) of interest during in vitro growth, preparation, or manufacturing of the strain prior to in vivo administration. In some embodiments, conditions for induction of the RssB promoter(s) are provided in culture, e.g., in a flask, fermenter or other appropriate culture vessel, e.g., used during cell growth, cell expansion, fermentation, recovery, purification, formulation, and/or manufacture.

[0743] In some embodiments, the PssB promoter indirectly drives the expression of one or more protein(s) of interest from a low-copy plasmid or a high copy plasmid or a biosafety system plasmid described herein. In some embodiments, the PssB promoter indirectly drives the expression of one or more protein(s) of interest from a construct which is integrated into the bacterial chromosome. Exemplary insertion sites are described herein.

[0744] In another non-limiting example, this strategy can be used to control expression of thyA and/or dapA, e.g., to make a conditional auxotroph. The chromosomal copy of dapA or ThyA is knocked out. Under anaerobic conditions, dapA or thyA -as the case may be- are expressed, and the strain can grow in the absence of dap or thymidine. Under aerobic conditions, dapA or thyA expression is shut off, and the strain cannot grow in the absence of dap or thymidine. Such a strategy can, for example be employed to allow survival of bacteria under anaerobic conditions, e.g., the gut, but prevent survival under aerobic conditions (biosafety switch). In some embodiments, the genetically engineered bacteria comprise one or more gene sequence(s) having at least 80%, 81%, 82%, 83%, 84%, 85%, 86%, 87%, 88%, 89%, 90%, 91%, 92%, 93%, 94%, 95%,96%, 97%, 98%, or 99% identity with any of the sequences of SEQ ID NO: 214.

[0745] Sequences useful for expression from inducible promoters are listed in Table 24.

TABLE 24
Inducible promoter construct sequences

| Description | Sequence |
|---|---|
| Arabinose | CAGACATTGCCGTCACTGCGTCTTTTACTGGCTCTTCTCGC |
| Promoter region | TAACCCAACCGGTAACCCCGCTTATTAAAAGCATTCTGTA |
| SEQ ID NO: | ACAAAGCGGGACCAAAGCCATGACAAAAACGCGTAACAA |
| 202 | AAGTGTCTATAATCACGGCAGAAAAGTCCACATTGATTAT |
| | TTGCACGGCGTCACACTTTGCTATGCCATAGCATTTTTATC |
| | CATAAGATTAGCGGATCCAGCCTGACGCTTTTTTTCGCAA |
| | CTCTCTACTGTTTCTCCATACCTCTAGAAATAATTTTGTTT |
| | AACTTTAAGAAGGAGATATACAT |
| AraC (reverse | TTATTCACAACCTGCCCTAAACTCGCTCGGACTCGCCCCG |
| orientation) | GTGCATTTTTTAAATACTCGCGAGAAATAGAGTTGATCGT |
| SEQ ID NO: | CAAAACCGACATTGCGACCGACGGTGGCGATAGGCATCC |
| 203 | GGGTGGTGCTCAAAAGCAGCTTCGCCTGACTGATGCGCTG |
| | GTCCTCGCGCCAGCTTAATACGCTAATCCCTAACTGCTGG |
| | CGGAACAAATGCGACAGACGCGACGGCGACAGGCAGACA |
| | TGCTGTGCGACGCTGGCGATATCAAAATTACTGTCTGCCA |
| | GGTGATCGCTGATGTACTGACAAGCCTCGCGTACCCGATT |
| | ATCCATCGGTGGATGGAGCGACTCGTTAATCGCTTCCATG |
| | CGCCGCAGTAACAATTGCTCAAGCAGATTTATCGCCAGCA |
| | ATTCCGAATAGCGCCCTTCCCCTTGTCCGGCATTAATGATT |
| | TGCCCAAACAGGTCGCTGAAATGCGGCTGGTGCGCTTCAT |
| | CCGGGCGAAAGAAACCGGTATTGGCAAATATCGACGGCC |
| | AGTTAAGCCATTCATGCCAGTAGGCGCGCGGACGAAAGT |
| | AAACCCACTGGTGATACCATTCGTGAGCCTCCGGATGACG |
| | ACCGTAGTGATGAATCTCTCCAGGCGGGAACAGCAAAAT |
| | ATCACCCGGTCGGCAGACAAATTCTCGTCCCTGATTTTTCA |
| | CCACCCCCTGACCGCGAATGGTGAGATTGAGAATATAACC |
| | TTTCATTCCCAGCGGTCGGTCGATAAAAAAATCGAGATAA |
| | CCGTTGGCCTCAATCGGCGTTAAACCCGCCACCAGATGGG |
| | CGTTAAACGAGTATCCCGGCAGCAGGGGATCATTTTGCGC |
| | TTCAGCCATACTTTTCATACTCCCGCCATTCAGAGAAGAA |
| | ACCAATTGTCCATATTGCAT |
| AraC | MQYGQLVSSLNGGSMKSMAEAQNDPLLPGYSFNAHLVAGL |
| polypeptide | TPIEANGYLDFFIDRPLGMKGYILNLTIRGQGVVKNQGREFV |
| SEQ ID NO: | CRPGDILLFPPGEIHHYGRHPEAHEWYHQWVYFRPRAYWHE |
| 204 | WLNWPSIFANTGFFRPDEAHQPHFSDLFGQIINAGQGEGRYS |
| | ELLAINLLEQLLLRRMEAINESLHPPMDNRVREACQYISDHL |
| | ADSNFDIASVAQHVCLSPSRLSHLFRQQLGISVLSWREDQRIS |
| | QAKLLLSTTRMPIATVGRNVGFDDQLYFSRVFKKCTGASPSE |
| | FRAGCE* |
| Region | CGGTGAGCATCACATCACCACAATTCAGCAAATTGTGAAC |
| comprising | ATCATCACGTTCATCTTTCCCTGGTTGCCAATGGCCCATTT |
| rhamnose | TCCTGTCAGTAACGAGAAGGTCGCGAATCAGGCGCTTTTT |
| inducible | AGACTGGTCGTAATGAAATTCAGCTGTCACCGGATGTGCT |
| promoter | TTCCGGTCTGATGAGTCCGTGAGGACGAAACAGCCTCTAC |
| SEQ ID NO: | AAATAATTTTGTTTAAAACAACACCCACTAAGATAACTCT |
| 205 | AGAAATAATTTTGTTTAACTTTAAGAAGGAGATATACAT |
| Lac Promoter | ATTCACCACCCTGAATTGACTCTCTTCCGGGCGCTATCATG |
| region | CCATACCGCGAAAGGTTTTGCGCCATTCGATGGCGCGCCG |
| SEQ ID NO: | CTTCGTCAGGCCACATAGCTTTCTTGTTCTGATCGGAACGA |
| 206 | TCGTTGGCTGTGTTGACAATTAATCATCGGCTCGTATAATG |
| | TGTGGAATTGTGAGCGCTCACAATTAGCTGTCACCGGATG |
| | TGCTTTCCGGTCTGATGAGTCCGTGAGGACGAAACAGCCT |
| | CTACAAATAATTTTGTTTAAAACAACACCCACTAAGATAA |
| | CTCTAGAAATAATTTTGTTTAACTTTAAGAAGGAGATATA |
| | CAT |
| LacO | GGAATTGTGAGCGCTCACAATT |
| LacI (in reverse | TCACTGCCCGCTTTCCAGTCGGGAAACCTGTCGTGCCAGC |
| orientation) | TGCATTAATGAATCGGCCAACGCGCGGGGAGAGGCGGTTT |
| SEQ ID NO: | GCGTATTGGGCGCCAGGGTGGTTTTTCTTTTCACCAGTGA |
| 207 | GACTGGCAACAGCTGATTGCCCTTCACCGCCTGGCCCTGA |
| | GAGAGTTGCAGCAAGCGGTCCACGCTGGTTTGCCCCAGCA |
| | GGCGAAAATCCTGTTTGATGGTGGTTAACGGCGGGATATA |
| | ACATGAGCTATCTTCGGTATCGTCGTATCCCACTACCGAG |
| | ATATCCGCACCAACGCGCAGCCCGGACTCGGTAATGGCGC |
| | GCATTGCGCCCAGCGCCATCTGATCGTTGGCAACCAGCAT |
| | CGCAGTGGGAACGATGCCCTCATTCAGCATTTGCATGGTT |
| | TGTTGAAAACCGGACATGGCACTCCAGTCGCCTTCCCGTT |
| | CCGCTATCGGCTGAATTTGATTGCGAGTGAGATATTTATG |
| | CCAGCCAGCCAGACGCAGACGCGCCGAGACAGAACTTAA |
| | TGGGCCCGCTAACAGCGCGATTTGCTGGTGACCCAATGCG |
| | ACCAGATGCTCCACGCCCAGTCGCGTACCGTCCTCATGGG |
| | AGAAAATAATACTGTTGATGGGTGTCTGGTCAGAGACATC |
| | AAGAAATAACGCCGGAACATTAGTGCAGGCAGCTTCCAC |
| | AGCAATGGCATCCTGGTCATCCAGCGGATAGTTAATGATC |
| | AGCCCACTGACGCGTTGCGCGAGAAGATTGTGCACCGCCG |
| | CTTTACAGGCTTCGACGCCGCTTCGTTCTACCATCGACACC |
| | ACCACGCTGGCACCCAGTTGATCGGCGCGAGATTTAATCG |
| | CCGCGACAATTTGCGACGGCGCGTGCAGGGCCAGACTGG |
| | AGGTGGCAACGCCAATCAGCAACGACTGTTTGCCCGCCAG |
| | TTGTTGTGCCACGCGGTTGGGAATGTAATTCAGCTCCGCC |
| | ATCGCCGCTTCCACTTTTTCCCGCGTTTTCGCAGAAACGTG |
| | GCTGGCCTGGTTCACCACGCGGGAAACGGTCTGATAAGAG |
| | ACACCGGCATACTCTGCGACATCGTATAACGTTACTGGTT |
| | TCAT |
| LacI | MKPVTLYDVAEYAGVSYQTVSRVVNQASHVSAKTREKVEA |
| polypeptide | AMAELNYIPNRVAQQLAGKQSLLIGVATSSLALHAPSQIVAA |
| sequence | IKSRADQLGASVVVSMVERSGVEACKAAVHNLLAQRVSGLI |
| SEQ ID NO: | INYPLDDQDAIAVEAACTNVPALFLDVSDQTPINSIIFSHEDGT |
| 208 | RLGVEHLVALGHQQIALLAGPLSSVSARLRLAGWHKYLTRN |
| | QIQPIAEREGDWSAMSGFQQTMQMLNEGIVPTAMLVANDQ |
| | MALGAMRAITESGLRVGADISVVGYDDTEDSSCYIPPLTTIK |
| | QDFRLLGQTSVDRLLQLSQGQAVKGNQLLPVSLVKRKTTLA |
| | PNTQTASPRALADSLMQLARQVSRLESGQ |
| Region | ACGTTAAATCTATCACCGCAAGGGATAAATATCTAACACC |
| comprising | GTGCGTGTTGACTATTTTACCTCTGGCGGTGATAATGGTTG |
| Temperature | CATAGCTGTCACCGGATGTGCTTTCCGGTCTGATGAGTCC |
| sensitive | GTGAGGACGAAACAGCCTCTACAAATAATTTTGTTTAAAA |
| promoter | CAACACCCACTAAGATAACTCTAGAAATAATTTTGTTTAA |
| SEQ ID NO: | CTTTAAGAAGGAGATATACAT |
| 209 | |
| mutant cI857 | TCAGCCAAACGTCTCTTCAGGCCACTGACTAGCGATAACT |
| repressor | TTCCCCACAACGGAACAACTCTCATTGCATGGGATCATTG |
| SEQ ID NO: | GGTACTGTGGGTTTAGTGGTTGTAAAAACACCTGACCGCT |
| 210 | ATCCCTGATCAGTTTCTTGAAGGTAAACTCATCACCCCCA |
| | AGTCTGGCTATGCAGAAATCACCTGGCTCAACAGCCTGCT |
| | CAGGGTCAACGAGAATTAACATTCCGTCAGGAAAGCTTGG |
| | CTTGGAGCCTGTTGGTGCGGTCATGGAATTACCTTCAACC |
| | TCAAGCCAGAATGCAGAATCACTGGCTTTTTTGGTTGTGC |
| | TTACCCATCTCTCCGCATCACCTTTGGTAAAGGTTCTAAGC |
| | TTAGGTGAGAACATCCCTGCCTGAACATGAGAAAAAACA |
| | GGGTACTCATACTCACTTCTAAGTGACGGCTGCATACTAA |
| | CCGCTTCATACATCTCGTAGATTTCTCTGGCGATTGAAGG |
| | GCTAAATTCTTCAACGCTAACTTTGAGAATTTTTGTAAGCA |
| | ATGCGGCGTTATAAGCATTTAATGCATTGATGCCATTAAA |
| | TAAAGCACCAACGCCTGACTGCCCCATCCCCATCTTGTCT |
| | GCGACAGATTCCTGGGATAAGCCAAGTTCATTTTTCTTTTT |
| | TTCATAAATTGCTTTAAGGCGACGTGCGTCCTCAAGCTGC |
| | TCTTGTGTTAATGGTTTCTTTTTTGTGCTCAT |
| RBS and leader | CTCTAGAAATAATTTTGTTTAACTTTAAGAAGGAGATATA |
| region | CAT |
| SEQ ID NO: | |
| 211 | |
| mutant cI857 | MSTKKKPLTQEQLEDARRLKAIYEKKKNELGLSQESVADKM |
| repressor | GMGQSGVGALFNGINALNAYNAALLTKILKVSVEEFSPSIAR |
| polypeptide | EIYEMYEAVSMQPSLRSEYEYPVFSHVQAGMFSPKLRTFTKG |
| sequence | DAERWVSTTKKASDSAFWLEVEGNSMTAPTGSKPSFPDGML |
| SEQ ID NO: | ILVDPEQAVEPGDFCIARLGGDEFTFKKLIRDSGQVFLQPLNP |
| 212 | QYPMIPCNESCSVVGKVIASQWPEETFG |
| TetR-Tet | Ttaagacccactttcacatttaagttgtttttctaatccgcatatgatcaattcaaggccgaataa |
| promoter | gaaggctggctctgcaccttggtgatcaaataattcgatagcttgtcgtaataatggcggcata |
| construct | ctatcagtagtaggtgtttccctttcttctttagcgacttgatgctcttgatcttccaatacgcaacct |
| SEQ ID NO: | aaagtaaaatgccccacagcgctgagtgcatataatgcattctctagtgaaaaaccttgttgg |
| 213 | cataaaaaggctaattgattttcgagagtttcatactgtttttctgtaggccgtgtacctaaatgta |
| | cttttgctccatcgcgatgacttagtaaagcacatctaaaacttttagcgttattacgtaaaaaat |
| | cttgccagctttccccttctaaagggcaaaagtgagtatggtgcctatctaacatctcaatggct |
| | aaggcgtcgagcaaagcccgcttattttttacatgccaatacaatgtaggctgctctacaccta |
| | gcttctgggcgagtttacgggttgttaaaccttcgattccgacctcattaagcagctctaatgcg |
| | ctgttaatcactttacttttatctaatctagacatcattaattcctaatttttgttgacactctatcattg |
| | atagagttattttaccactccctatcagtgatagagaaaagtgaactctagaaataattttgttt |
| | aactttaagaaggagatatacat |
| PssB promoter | tcacctttcccggattaaacgcttttttgcccggtggcatggtgctaccggcgatcacaaacggtta |
| SEQ ID NO: | attatgacacaaattgacctgaatgaatatacagtattggaatgcattacccggagtgttgtgtaac |
| 214 | aatgtctggccaggtttgtttcccggaaccgaggtcacaacatagtaaaagcgctattggtaatgg |
| | tacaatcgcgcgtttacacttattc |

[0746] Constitutive Promoters

[0747] In some embodiments, the gene encoding the payload is present on a plasmid and operably linked to a constitutive promoter. In some embodiments, the gene encoding the payload is present on a chromosome and operably linked to a constitutive promoter.

[0748] In some embodiments, the constitutive promoter is active under in vivo conditions, e.g., the gut, as described herein. In some embodiments, the promoters is active under in vitro conditions, e.g., various cell culture and/or cell manufacturing conditions, as described herein. In some embodiments, the constitutive promoteris active under in vivo conditions, e.g., the gut, as described herein, and under in vitro conditions, e.g., various cell culture and/or cell production and/or manufacturing conditions, as described herein.

[0749] In some embodiments, the constitutive promoterthat is operably linked to the gene encoding the payload is active in various exogenous environmental conditions (e.g., in vivo and/or in vitro and/or production/manufacturing conditions).

[0750] In some embodiments, the constitutive promoteris active in exogenous environmental conditions specific to the gut of a mammal. In some embodiments, the constitutive promoteris active in exogenous environmental conditions specific to the small intestine of a mammal. In some embodiments, the constitutive promoteris active in low-oxygen or anaerobic conditions such as the environment of the mammalian gut. In some embodiments, the constitutive promoteris active in the presence of molecules or metabolites that are specific to the gut of a mammal. In some embodiments, the constitutive promoteris directly or indirectly induced by a molecule that is co-administered with the bacterial cell. In some embodiments, the constitutive promoteris active in the presence of molecules or metabolites or other conditions, that are present during in vitro culture, cell production and/or manufacturing conditions.

[0751] Bacterial constitutive promoters are known in the art. For example, a lisitng of suitable promoters from a number of bacterial species and bacteriophages can be found at: http://parts.igem.org/Promoters/Catalog/Constitutive.

### Induction of Payloads During Strain Culture

[0752] In some embodiments, it is desirable to pre-induce payload or protein of interest expression and/or payload activity prior to administration. Such payload or protein of interest may be an effector intended for secretion or may be an enzyme which catalyzes a metabolic reaction to produce an effector. In other embodiments, the protein of interest is an enzyme which catabolizes a harmful metabolite. In such situations, the strains are pre-loaded with active payload or protein of interest. In such instances, the genetically engineered bacteria of the invention express one or more protein(s) of interest, under conditions provided in bacterial culture during cell growth, expansion, purification, fermentation, and/or manufacture prior to administration in vivo. Such culture conditions can be provided in a flask, fermenter or other appropriate culture vessel, e.g., used during cell growth, cell expansion, fermentation, recovery, purification, formulation, and/or manufacture. As used herein, the term “bacterial culture” or bacterial cell culture” or “culture” refers to bacterial cells or microorganisms, which are maintained or grown in vitro during several production processes, including cell growth, cell expansion, recovery, purification, fermentation, and/or manufacture. As used herein, the term “fermentation” refers to the growth, expansion, and maintenance of bacteria under defined conditions. Fermentation may occur under a number of cell culture conditions, including anaerobic or low oxygen or oxygenated conditions, in the presence of inducers, nutrients, at defined temperatures, and the like.

[0753] Culture conditions are selected to achieve optimal activity and viability of the cells, while maintaining a high cell density (high biomass) yield. A number of cell culture conditions and operating parameters are monitored and adjusted to achieve optimal activity, high yield and high viability, including oxygen levels (e.g., low oxygen, microaerobic, aerobic), temperature of the medium, and nutrients and/or different growth media, chemical and/or nutritional inducers and other components provided in the medium. In some embodiments, phenylalanine is added to the media, e.g., to boost cell health. Without wishing to be bound by theory, addition of phenylalanine to the medium may prevent bacteria from catabolizing endogenously produced phenylalanine required for cell growth.

[0754] In some embodiments, the one or more protein(s) of interest and are directly or indirectly induced, while the strains is grown up for in vivo administration. Without wishing to be bound by theory, pre-induction may boost in vivo activity. This is particularly important in proximal regions of the gut which are reached first by the bacteria, e.g., the small intestine. If the bacterial residence time in this compartment is relatively short, the bacteria may pass through the small intestine without reaching full in vivo induction capacity. In contrast, if a strain is pre-induced and preloaded, the strains are already fully active, allowing for greater activity more quickly as the bacteria reach the intestine. Ergo, no transit time is “wasted”, in which the strain is not optimally active. As the bacteria continue to move through the intestine, in vivo induction occurs under environmental conditions of the gut (e.g., low oxygen, or in the presence of gut metabolites).

[0755] In one embodiment, expression of one or more payload(s), is induced during cell growth, cell expansion, fermentation, recovery, purification, formulation, and/or manufacture. In one embodiment, expression of several different proteins of interest is induced during cell growth, cell expansion, fermentation, recovery, purification, formulation, and/or manufacture. In one embodiment, expression of one or more payload(s), is driven from the same promoter as a multicistronic message. In one embodiment, expression of one or more payload(s) is driven from the same promoter as two or more separate messages. In one embodiment, expression of one or more payload(s) is driven from the one or more different promoters.

[0756] In some embodiments, the strains are administered without any pre-induction protocols during strain growth prior to in vivo administration.

[0757] Anaerobic Induction

[0758] In some embodiments, cells are induced under anaerobic or low oxygen conditions in culture. In such instances, cells are grown (e.g., for 1.5 to 3 hours) until they have reached a certain OD, e.g., ODs within the range of 0.1 to 10, indicating a certain density e.g., ranging from 1×10̂8 to 1×10̂11, and exponential growth and are then switched to anaerobic or low oxygen conditions for approximately 3 to 5 hours. In some embodiments, strains are induced under anaerobic or low oxygen conditions, e.g. to induce FNR promoter activity and drive expression of one or more payload(s) and /or Phe transporters under the control of one or more FNR promoters.

[0759] In one embodiment, expression of one or more payload(s), is under the control of one or more FNR promoter(s) and is induced during cell growth, cell expansion, fermentation, recovery, purification, formulation, and/or manufacture under anaerobic or low oxygen conditions. In one embodiment, expression of several different proteins of interest is under the control of one or more FNR promoter(s) and is induced during cell growth, cell expansion, fermentation, recovery, purification, formulation, and/or manufacture under anaerobic or low oxygen conditions.

[0760] In one embodiment, expression of two or more payload(s), is under the control of one or more FNR promoter(s) and is driven from the same promoter in the form of a multicistronic message under anaerobic or low oxygen conditions. In one embodiment, expression of one or more payload(s), is under the control of one or more FNR promoter(s) and is driven from the same promoter as two or more separate messages under anaerobic or low oxygen conditions. In one embodiment, expression of one or more payload(s under the control of one or more FNR promoter(s) and is driven from the one or more different promoters under anaerobic or low oxygen conditions.

[0761] Without wishing to be bound by theory, strains that comprise one or more payload(s) under the control of an FNR promoter, may allow expression of payload(s) from these promoters in vitro, under anaerobic or low oxygen culture conditions, and in vivo, under the low oxygen conditions found in the gut.

[0762] In some embodiments, promoters inducible by arabinose, IPTG, rhamnose, tetracycline, and/or other chemical and/or nutritional inducers can be induced under anaerobic or low oxygen conditions in the presence of the chemical and/or nutritional inducer. In particular, strains may comprise a combination of gene sequence(s), some of which are under control of FNR promoters and others which are under control of promoters induced by chemical and/or nutritional inducers. In some embodiments, strains may comprise one or more payload gene sequence(s) under the control of one or more FNR promoter(s) and one or more payload gene sequence(s) and/or Phe transporter gene sequence(s) and /or transcriptional regulator gene sequence(s) under the control of a one or more promoter(s) which are induced by a one or more chemical and/or nutritional inducer(s), including, but not limited to, arabinose, IPTG, rhamnose, tetracycline, and/or other chemical and/or nutritional inducers described herein or known in the art. In some embodiments, strains may comprise one or more payload gene sequence(s) and/or under the control of one or more FNR promoter(s), and one or more payload gene sequence(s) under the control of a one or more constitutive promoter(s) described herein. In some embodiments, strains may comprise one or more payload gene sequence(s) under the control of an FNR promoter and one or more payload gene sequence(s) under the control of a one or more thermoregulated promoter(s) described herein.

[0763] In one embodiment, expression of one or more Payload is under the control of one or more promoter(s) regulated by chemical and/or nutritional inducers and is induced during cell growth, cell expansion, fermentation, recovery, purification, formulation, and/or manufacture under anaerobic and/or low oxygen conditions. In one embodiment, the chemical and/or nutritional inducer is arabino se and the promoter is inducible by arabinose. In one embodiment, the chemical and/or nutritional inducer is IPTG and the promoter is inducible by IPTG. In one embodiment, the chemical and/or nutritional inducer is rhamnose and the promoter is inducible by rhamnose. In one embodiment, the chemical and/or nutritional inducer is tetracycline and the promoter is inducible by tetracycline.

[0764] In one embodiment, expression of one or more payload(s), is under the control of one or more promoter(s) regulated by chemical and/or nutritional inducers and is driven from the same promoter in the form of a multicistronic message under anaerobic and/or low oxygen conditions. In one embodiment, expression of one or more payload(s), is under the control of one or more promoter(s) regulated by chemical and/or nutritional inducers and is driven from the same promoter as two or more separate messages under anaerobic and/or low oxygen conditions. In one embodiment, expression of one or more payload(s), is under the control of one or more promoter(s) regulated by chemical and/or nutritional inducers and is driven from the one or more different promoters under anaerobic and/or low oxygen conditions.

[0765] In one embodiment, strains may comprise a combination of gene sequence(s), some of which are under control of a first inducible promoter and others which are under control of a second inducible promoter, both induced by chemical and/or nutritional inducers, under anaerobic or low oxygen conditions. In one embodiment, strains may comprise a combination of gene sequence(s), some of which are under control of a first inducible promoter and others which are under control of a second inducible promoter, both induced by chemical and/or nutritional inducers. In some embodiments, the strains comprise gene sequence(s) under the control of a a third inducible promoter, e.g., an anaerobic/low oxygen promoter, e.g., FNR promoter. In one embodiment, strains may comprise a combination of gene sequence(s), some of which are under control of a first inducible promoter, e.g., a chemically induced promoter or a low oxygen promoter and others which are under control of a second inducible promoter, e.g. a temperature sensitive promoter. In one embodiment, strains may comprise a combination of gene sequence(s), some of which are under control of a first inducible promoter, e.g., a FNR promoter and others which are under control of a second inducible promoter, e.g. a temperature sensitive promoter. In one embodiment, strains may comprise a combination of gene sequence(s), some of which are under control of a first inducible promoter, e.g., a chemically induced and others which are under control of a second inducible promoter, e.g. a temperature sensitive promoter. In some embodiments, strains may comprise one or more payload gene sequence(s) and/or Phe transporter gene sequence(s) and /or transcriptional regulator gene sequence(s) under the control of an FNR promoter and one or more payload gene sequence(s) and/or Phe transporter gene sequence(s) and /or transcriptional regulator gene sequence(s) under the control of a one or more promoter(s) which are induced by a one or more chemical and/or nutritional inducer(s), including, but not limited to, by arabinose, IPTG, rhamnose, tetracycline, and/or other chemical and/or nutritional inducers described herein or known in the art. Additionally the strains may comprise a construct which is under thermoregulatory control. In some embodiments, the bacteria strains further comprise payload and or Phe transporter sequence(s) under the control of one or more constitutive promoter(s) active under low oxygen conditions.

### Aerobic Induction

[0766] In some embodiments, it is desirable to prepare, pre-load and pre-induce the strains under aerobic conditions. This allows more efficient growth and viability, and, in some cases, reduces the build-up of toxic metabolites. In such instances, cells are grown (e.g., for 1.5 to 3 hours) until they have reached a certain OD, e.g., ODs within the range of 0.1 to 10, indicating a certain density e.g., ranging from 1×10̂8 to 1×10̂11, and exponential growth and are then induced through the addition of the inducer or through other means, such as shift to a permissive temperature, for approximately 3 to 5 hours.

[0767] In some embodiments, promoters inducible by arabinose, IPTG, rhamnose, tetracycline, and/or other chemical and/or nutritional inducers described herein or known in the art can be induced under aerobic conditions in the presence of the chemical and/or nutritional inducer during cell growth, cell expansion, fermentation, recovery, purification, formulation, and/or manufacture. In one embodiment, expression of one or more payload(s) is under the control of one or more promoter(s) regulated by chemical and/or nutritional inducers and is induced during cell growth, cell expansion, fermentation, recovery, purification, formulation, and/or manufacture under aerobic conditions.

[0768] In one embodiment, expression of one or more payload(s), is under the control of one or more promoter(s) regulated by chemical and/or nutritional inducers and is driven from the same promoter in the form of a multicistronic message under aerobic conditions. In one embodiment, expression of one or more payload(s), is under the control of one or more promoter(s) regulated by chemical and/or nutritional inducers and is driven from the same promoter as two or more separate messages under aerobic conditions. In one embodiment, expression of one or more payload(s), is under the control of one or more promoter(s) regulated by chemical and/or nutritional inducers and is driven from the one or more different promoters under aerobic conditions.

[0769] In one embodiment, the chemical and/or nutritional inducer is arabinose and the promoter is inducible by arabinose. In one embodiment, the chemical and/or nutritional inducer is IPTG and the promoter is inducible by IPTG. In one embodiment, the chemical and/or nutritional inducer is rhamnose and the promoter is inducible by rhamnose. In one embodiment, the chemical and/or nutritional inducer is tetracycline and the promoter is inducible by tetracycline.

[0770] In some embodiments, promoters regulated by temperature are induced during cell growth, cell expansion, fermentation, recovery, purification, formulation, and/or manufacture. In one embodiment, expression of one or more payload(s) is driven directly or indirectly by one or more thermoregulated promoter(s) and is induced during cell growth, cell expansion, fermentation, recovery, purification, formulation, and/or manufacture under aerobic conditions.

[0771] In one embodiment, expression of one or more payload(s) is driven directly or indirectly by one or more thermoregulated promoter(s) and is driven from the same promoter in the form of a multicistronic message under aerobic conditions. In one embodiment, expression of one or more payload(s) is driven directly or indirectly by one or more thermoregulated promoter(s)and is driven from the same promoter as two or more separate messages under aerobic conditions. In one embodiment, expression of one or more payload(s) is driven directly or indirectly by one or more thermoregulated promoter(s) and is driven from the one or more different promoters under aerobic conditions.

[0772] In one embodiment, strains may comprise a combination of gene sequence(s), some of which are under control of a first inducible promoter and others which are under control of a second inducible promoter, both induced under aerobic conditions. In some embodiments, a strain comprises three or more different promoters which are induced under aerobic culture conditions.

[0773] In one embodiment, strains may comprise a combination of gene sequence(s), some of which are under control of a first inducible promoter and others which are under control of a second inducible promoter, both induced by chemical and/or nutritional inducers. In one embodiment, strains may comprise a combination of gene sequence(s), some of which are under control of a first inducible promoter, e.g. a chemically inducible promoter, and others which are under control of a second inducible promoter, e.g. a temperature sensitive promoter under aerobic culture conditions. In some embodiments two or more chemically induced promoter gene sequence(s) are combined with a thermoregulated construct described herein. In one embodiment, the chemical and/or nutritional inducer is arabino se and the promoter is inducible by arabinose. In one embodiment, the chemical and/or nutritional inducer is IPTG and the promoter is inducible by IPTG. In one embodiment, the chemical and/or nutritional inducer is rhamnose and the promoter is inducible by rhamnose. In one embodiment, the chemical and/or nutritional inducer is tetracycline and the promoter is inducible by tetracycline.

[0774] In one embodiment, strains may comprise a combination of gene sequence(s), some of which are under control of a first inducible promoter, e.g., a FNR promoter and others which are under control of a second inducible promoter, e.g. a temperature sensitive promoter. In one embodiment, strains may comprise a combination of gene sequence(s), some of which are under control of a first inducible promoter, e.g., a chemically induced and others which are under control of a second inducible promoter, e.g. a temperature sensitive promoter. In some embodiments, strains may comprise one or more payload gene sequence(s) and/or Phe transporter gene sequence(s) and /or transcriptional regulator gene sequence(s) under the control of an FNR promoter and one or more payload gene sequence(s) and/or Phe transporter gene sequence(s) and /or transcriptional regulator gene sequence(s) under the control of a one or more promoter(s) which are induced by a one or more chemical and/or nutritional inducer(s), including, but not limited to, by arabinose, IPTG, rhamnose, tetracycline, and/or other chemical and/or nutritional inducers described herein or known in the art. Additionally the strains may comprise a construct which is under thermoregulatory control. In some embodiments, the bacteria strains further comprise payload and or Phe transporter sequence(s) under the control of one or more constitutive promoter(s) active under aerobic conditions.

[0775] In some embodiments, genetically engineered strains comprise gene sequence(s) which are induced under aerobic culture conditions. In some embodiments, these strains further comprise FNR inducible gene sequence(s) for in vivo activation in the gut. In some embodiments, these strains do not further comprise FNR inducible gene sequence(s) for in vivo activation in the gut.

[0776] In some embodiments, genetically engineered strains comprise gene sequence(s), which are arabinose inducible under aerobic culture conditions. In some embodiments, these strains do not further comprise FNR inducible gene sequence(s) for in vivo activation in the gut.

[0777] In some embodiments, genetically engineered strains comprise gene sequence(s), which are IPTG inducible under aerobic culture conditions. In some embodiments, these strains further comprise FNR inducible gene sequence(s) for in vivo activation in the gut. In some embodiments, these strains do not further comprise FNR inducible gene sequence(s) for in vivo activation in the gut.

[0778] In some embodiments, genetically engineered strains comprise gene sequence(s) which are arabinose inducible under aerobic culture conditions. In some embodiments, such a strain further comprises sequence(s) which are IPTG inducible under aerobic culture conditions. In some embodiments, these strains further comprise FNR inducible gene payload and/or Phe transporter sequence(s) for in vivo activation in the gut. In some embodiments, these strains do not further comprise FNR inducible gene sequence(s) for in vivo activation in the gut.

[0779] As evident from the above non-limiting examples, genetically engineered strains comprise inducible gene sequence(s) which can be induced numerous combinations. For example, rhamnose or tetracycline can be used as an inducer with the appropriate promoters in addition or in lieu of arabinose and/or IPTG or with thermoregulation. Additionally, such bacterial strains can also be induced with the chemical and/or nutritional inducers under anaerobic conditions.

### Microaerobic Induction

[0780] In some embodiments, viability, growth, and activity are optimized by pre-inducing the bacterial strain under microaerobic conditions. In some embodiments, microaerobic conditions are best suited to “strike a balance” between optimal growth, activity and viability conditions and optimal conditions for induction; in particular, if the expression of the one or more payload(s) and/or Phe transporter(s) are driven by a anaerobic and/or low oxygen promoter, e.g., a FNR promoter. In such instances, cells are grown (e.g., for 1.5 to 3 hours) until they have reached a certain OD, e.g., ODs within the range of 0.1 to 10, indicating a certain density e.g., ranging from 1×10̂8 to 1×10̂11, and exponential growth and are then induced through the addition of the inducer or through other means, such as shift to at a permissive temperature, for approximately 3 to 5 hours.

[0781] In one embodiment, expression of one or more payload(s) is under the control of one or more FNR promoter(s) and is induced during cell growth, cell expansion, fermentation, recovery, purification, formulation, and/or manufacture under microaerobic conditions.

[0782] In one embodiment, expression of one or more payload(s), is under the control of one or more FNR promoter(s) and is driven from the same promoter in the form of a multicistronic message under microaerobic conditions. In one embodiment, expression of one or more payload(s), is under the control of one or more FNR promoter(s) and is driven from the same promoter as two or more separate messages under microaerobic conditions. In one embodiment, expression of one or more payload(s), is under the control of one or more FNR promoter(s) and is driven from the one or more different promoters under microaerobic conditions.

[0783] Without wishing to be bound by theory, strains that comprise one or more payload(s) under the control of an FNR promoter, may allow expression of payload(s) from these promoters in vitro, under microaerobic culture conditions, and in vivo, under the low oxygen conditions found in the gut.

[0784] In some embodiments, promoters inducible by arabinose, IPTG, rhamnose, tetracycline, and/or other chemical and/or nutritional inducers can be induced under microaerobic conditions in the presence of the chemical and/or nutritional inducer. In particular, strains may comprise a combination of gene sequence(s), some of which are under control of FNR promoters and others which are under control of promoters induced by chemical and/or nutritional inducers. In some embodiments, strains may comprise one or more payload gene sequence(s) sequence(s) under the control of one or more FNR promoter(s) and one or more payload gene sequence(s) under the control of a one or more promoter(s) which are induced by a one or more chemical and/or nutritional inducer(s), including, but not limited to, arabinose, IPTG, rhamnose, tetracycline, and/or other chemical and/or nutritional inducers described herein or known in the art. In some embodiments, strains may comprise one or more payload gene sequence(s) under the control of one or more FNR promoter(s), and one or more payload gene sequence(s) under the control of a one or more constitutive promoter(s) described herein. In some embodiments, strains may comprise one or more payload gene sequence(s) under the control of an FNR promoter and one or more payload gene sequence(s) under the control of a one or more thermoregulated promoter(s) described herein.

[0785] In one embodiment, expression of one or more payload(s) is under the control of one or more promoter(s) regulated by chemical and/or nutritional inducers and is induced during cell growth, cell expansion, fermentation, recovery, purification, formulation, and/or manufacture under microaerobic conditions.

[0786] In one embodiment, expression of one or more payload(s), is under the control of one or more promoter(s) regulated by chemical and/or nutritional inducers and is driven from the same promoter in the form of a multicistronic message under microaerobic conditions. In one embodiment, expression of one or more payload(s), is under the control of one or more promoter(s) regulated by chemical and/or nutritional inducers and is driven from the same promoter as two or more separate messages under microaerobic conditions. In one embodiment, expression of one or more payload(s), is under the control of one or more promoter(s) regulated by chemical and/or nutritional inducers and is driven from the one or more different promoters under microaerobic conditions.

[0787] In one embodiment, strains may comprise a combination of gene sequence(s), some of which are under control of a first inducible promoter and others which are under control of a second inducible promoter, both induced by chemical and/or nutritional inducers, under microaerobic conditions. In one embodiment, strains may comprise a combination of gene sequence(s), some of which are under control of a first inducible promoter and others which are under control of a second inducible promoter, both induced by chemical and/or nutritional inducers. In some embodiments, the strains comprise gene sequence(s) under the control of a third inducible promoter, e.g., an anaerobic/low oxygen promoter or microaerobic promoter, e.g., FNR promoter. In one embodiment, strains may comprise a combination of gene sequence(s), some of which are under control of a first inducible promoter, e.g., a chemically induced promoter or a low oxygen or microaerobic promoter and others which are under control of a second inducible promoter, e.g. a temperature sensitive promoter. In one embodiment, strains may comprise a combination of gene sequence(s), some of which are under control of a first inducible promoter, e.g., a FNR promoter and others which are under control of a second inducible promoter, e.g. a temperature sensitive promoter. In one embodiment, strains may comprise a combination of gene sequence(s), some of which are under control of a first inducible promoter, e.g., a chemically induced and others which are under control of a second inducible promoter, e.g. a temperature sensitive promoter. In some embodiments, strains may comprise one or more payload gene sequence(s) under the control of an FNR promoter and one or more payload gene sequence(s) under the control of a one or more promoter(s) which are induced by a one or more chemical and/or nutritional inducer(s), including, but not limited to, by arabinose, IPTG, rhamnose, tetracycline, and/or other chemical and/or nutritional inducers described herein or known in the art. Additionally the strains may comprise a construct which is under thermoregulatory control. In some embodiments, the bacteria strains further comprise payload under the control of one or more constitutive promoter(s) active under low oxygen conditions.

Induction of Strains Using Phasing, Pulsing and/or Cycling

[0788] In some embodiments, cycling, phasing, or pulsing techniques are emplyed during cell growth, expansion, recovery, purification, fermentation, and/or manufacture to efficienty induce and grow the strains prior to in vivo administration. This method is used to “strike a balance” between optimal growth, activity, cell health, and viability conditions and optimal conditions for induction; in particular, if growth, cell health or viability are negatively affected under inducing conditions. In such instances, cells are grown (e.g., for 1.5 to 3 hours) in a first phase or cycle until they have reached a certain OD, e.g., ODs within the range of 0.1 to 10, indicating a certain density e.g., ranging from 1×10̂8 to 1×10̂11, and are then induced through the addition of the inducer or through other means, such as shift to a permissive temperature (if a promoter is thermoregulated), or change in oxygen levels (e.g., reduction of oxygen level in the case of induction of an FNR promoter driven construct) for approximately 3 to 5 hours. In a second phase or cycle, conditions are brought back to the original conditions which support optimal growth, cell health and viability. Alternatively, if a chemical and/or nutritional inducer is used, then the culture can be spiked with a second dose of the inducer in the second phase or cycle.

[0789] In some embodiments, two cycles of optimal conditions and inducing conditions are employed (i.e, growth, induction, recovery and growth, induction). In some embodiments, three cycles of optimal conditions and inducing conditions are employed. In some embodiments, four or more cycles of optimal conditions and inducing conditions are employed. In a non-liming example, such cycling and/or phasing is used for induction under anaerobic and/or low oxygen conditions (e.g., induction of FNR promoters). In one embodiment, cells are grown to the optimal density and then induced under anaerobic and/or low oxygen conditions. Before growth and/or viability are negatively impacted due to stressful induction conditions, cells are returned to oxygenated conditions to recover, after which they are then returned to inducing anaerobic and/or low oxygen conditions for a second time. In some embodiments, these cycles are repeated as needed.

[0790] In some embodiments, growing cultures are spiked once with the chemical and/or nutritional inducer. In some embodiments, growing cultures are spiked twice with the chemical and/or nutritional inducer. In some embodiments, growing cultures are spiked three or more times with the chemical and/or nutritional inducer. In a non-limiting example, cells are first grown under optimal growth conditions up to a certain density, e.g., for 1.5 to 3 hour) to reached an of 0.1 to 10, until the cells are at a density ranging from 1×10̂8 to 1×10̂11. Then the chemical inducer, e.g., arabinose or IPTG, is added to the culture. After 3 to 5 hours, an additional dose of the inducer is added to re-initiate the induction. Spiking can be repeated as needed.

[0791] In some embodiments, phasing or cycling changes in temperature in the culture. In another embodiment, adjustment of temperature may be used to improve the activity of a payload. For example, lowering the temperature during culture may improve the proper folding of the payload. In such instances, cells are first grown at a temperature optimal for growth (e.g., 37 C). In some embodiments, the cells are then induced, e.g., by a chemical inducer, to express the payload. Concurrently or after a set amount of induction time, the temperature in the media is lowered, e.g., between 25 and 35 C, to allow improved folding of the expressed payload, e.g., PAL.

[0792] In some embodiments, payload(s) are under the control of different inducible promoters, for example two different chemical inducers. In other embodiments, the payload is induced under low oxygen conditions or microaerobic conditions and a second payload is induced by a chemical inducer.

[0793] In one embodiment, expression of one or more payload(s) is under the control of one or more FNR promoter(s) and is induced during cell growth, cell expansion, fermentation, recovery, purification, formulation, and/or manufacture by using phasing or cycling or pulsing or spiking techniques.

[0794] In one embodiment, expression of one or more payload(s), is under the control of one or more FNR promoter(s) and is driven from the same promoter in the form of a multicistronic message through the employment of phasing or cycling or pulsing or spiking techniques. In one embodiment, expression of one or more payload(s), is under the control of one or more FNR promoter(s) and is driven from the same promoter as two or more separate messages through the employment of phasing or cycling or pulsing or spiking techniques. In one embodiment, expression of one or more payload(s), is under the control of one or more FNR promoter(s) and is driven from the one or more different promoters through the employment of phasing or cycling or pulsing or spiking techniques.

[0795] In some embodiments, promoters inducible by arabinose, IPTG, rhamnose, tetracycline, and/or other chemical and/or nutritional inducers can be induced through the employment of phasing or cycling or pulsing or spiking techniques in the presence of the chemical and/or nutritional inducer. In particular, strains may comprise a combination of gene sequence(s), some of which are under control of FNR promoters and others which are under control of promoters induced by chemical and/or nutritional inducers. In some embodiments, strains may comprise one or more payload gene sequence(s) under the control of one or more FNR promoter(s) and one or more payload gene sequence(s) under the control of a one or more promoter(s) which are induced by a one or more chemical and/or nutritional inducer(s), including, but not limited to, arabinose, IPTG, rhamnose, tetracycline, and/or other chemical and/or nutritional inducers described herein or known in the art. In some embodiments, strains may comprise one or more payload gene sequence(s) under the control of one or more FNR promoter(s), and one or more payload gene sequence(s) and/or Phe transporter gene sequence(s) and /or transcriptional regulator gene sequence(s) under the control of a one or more constitutive promoter(s) described herein and are induced through the employment of phasing or cycling or pulsing or spiking techniques. In some embodiments, strains may comprise one or more payload gene sequence(s) under the control of an FNR promoter and one or more payload gene sequence(s) under the control of a one or more thermoregulated promoter(s) described herein, and are induced through the employment of phasing or cycling or pulsing or spiking techniques.

[0796] Any of the strains described herein can be grown through the employment of phasing or cycling or pulsing or spiking techniques. In one embodiment, expression of one or more payload(s) is under the control of one or more promoter(s) regulated by chemical and/or nutritional inducers and is induced during cell growth, cell expansion, fermentation, recovery, purification, formulation, and/or manufacture under anaerobic and/or low oxygen conditions.

[0797] In one embodiment, expression of one or more payload(s), is under the control of one or more promoter(s) regulated by chemical and/or nutritional inducers and is driven from the same promoter in the form of a multicistronic message and which are induced through the employment of phasing or cycling or pulsing or spiking techniques. In one embodiment, expression of one or more payload(s), is under the control of one or more promoter(s) regulated by chemical and/or nutritional inducers and is driven from the same promoter as two or more separate messages and is grown through the employment of phasing or cycling or pulsing or spiking techniques. In one embodiment, expression of one or more payload(s), is under the control of one or more promoter(s) regulated by chemical and/or nutritional inducers and is driven from the one or more different promoters, all of which are induced through the employment of phasing or cycling or pulsing or spiking techniques.

[0798] In one embodiment, strains may comprise a combination of gene sequence(s), some of which are under control of a first inducible promoter and others which are under control of a second inducible promoter, both induced by chemical and/or nutritional inducers, through the employment of phasing or cycling or pulsing or spiking techniques. In one embodiment, strains may comprise a combination of gene sequence(s), some of which are under control of a first inducible promoter and others which are under control of a second inducible promoter, both induced by chemical and/or nutritional inducers through the employment of phasing or cycling or pulsing or spiking techniques. In some embodiments, the strains comprise gene sequence(s) under the control of a a third inducible promoter, e.g., an anaerobic/low oxygen promoter, e.g., FNR promoter. In one embodiment, strains may comprise a combination of gene sequence(s), some of which are under control of a first inducible promoter, e.g., a chemically induced promoter or a low oxygen promoter and others which are under control of a second inducible promoter, e.g. a temperature sensitive promoter. In one embodiment, strains may comprise a combination of gene sequence(s), some of which are under control of a first inducible promoter, e.g., a FNR promoter and others which are under control of a second inducible promoter, e.g. a temperature sensitive promoter. In one embodiment, strains may comprise a combination of gene sequence(s), some of which are under control of a first inducible promoter, e.g., a chemically induced and others which are under control of a second inducible promoter, e.g. a temperature sensitive promoter. In some embodiments, strains may comprise one or more payload gene sequence(s) under the control of an FNR promoter and one or more payload gene sequence(s) under the control of a one or more promoter(s) which are induced by a one or more chemical and/or nutritional inducer(s), including, but not limited to, by arabinose, IPTG, rhamnose, tetracycline, and/or other chemical and/or nutritional inducers described herein or known in the art. Additionally the strains may comprise a construct which is under thermoregulatory control. In some embodiments, the bacteria strains further comprise payload sequence(s) under the control of one or more constitutive promoter(s) active under low oxygen conditions. Any of the strains described in these embodiments may be induced through the employment of phasing or cycling or pulsing or spiking techniques.

### Aerobic Induction of the FNR Promoter

[0799] FNRS24Y is a mutated form of FNR which is more resistant to inactivation by oxygen, and therefore can activate FNR promoters under aerobic conditions (see e.g., Jervis A J The O2 sensitivity of the transcription factor FNR is controlled by Ser24 modulating the kinetics of [4Fe-4S] to [2Fe-2S] conversion, Proc Natl Acad Sci U S A. 2009 Mar. 24; 106(12):4659-64, the contents of which is herein incorporated by reference in its entirety). In some embodiments, oxygen bypass system shown and described in FIG. 78 is used. In this oxygen bypass system, FNRS24Y is induced by addition of arabinose and then drives the expression of the protein of interest (e.g., one or more metabolic effector(s) described herein) by binding and activating the FNR promoter under aerobic conditions. Thus, strains can be grown, produced or manufactured efficiently under aerobic conditions, while being effectively pre-induced and pre-loaded, as the system takes advantage of the strong FNR promoter resulting in of high levels of expression of the protein of interest. This system does not interfere with or compromise in vivo activation, since the mutated FNRS24Y is no longer expressed in the absence of arabinose, and wild type FNR then binds to the FNR promoter and drives expression of the protein of interest, e.g., one or more metabolic effector(s) described herein.

[0800] In some embodiments, FNRS24Y is expressed during aerobic culture growth and induces a gene of interest. In other embodiments described herein, a second payload expression can also be induced aerobically, e.g., by arabinose. In a non-limiting example, a protein of interest and FNRS24Y can in some embodiments be induced simultaneously, e.g., from an arabinose inducible promoter. In some embodiments, FNRS24Y and the protein of interest (e.g., one or more metabolic effector(s) described herein) are transcribed as a bicistronic message whose expression is driven by an arabinose promoter. In some embodiments, FNRS24Y is knocked into the arabinose operon, allowing expression to be driven from the endogenous Para promoter.

[0801] In some embodiments, a LacI promoter and IPTG induction are used in this system (in lieu of Para and arabinose induction). In some embodiments, a rhamnose inducible promoter is used in this system. In some embodiments, a temperature sensitive promoter is used to drive expression of FNRS24Y.

[0802] Mutagenesis

[0803] In some embodiments, an inducible promoter is operably linked to a detectable product, e.g., GFP, and can be used to screen for mutants. In some embodiments, an oxygen level-dependent promoter is operably linked to a detectable product, e.g., GFP, and can be used to screen for mutants. In some embodiments, the oxygen level-dependent promoter is mutagenized, and mutants are selected based upon the level of detectable product, e.g., by flow cytometry, fluorescence-activated cell sorting (FACS) when the detectable product fluoresces. In some embodiments, one or more transcription factor binding sites is mutagenized to increase or decrease binding. In alternate embodiments, the wild-type binding sites are left intact and the remainder of the regulatory region is subjected to mutagenesis. In some embodiments, the mutant promoter is inserted into the genetically engineered bacteria of the invention to increase expression of the metabolic and/or satiety effector and/or immune modulator molecule in low-oxygen conditions, as compared to unmutated bacteria of the same subtype under the same conditions. In some embodiments, the oxygen level-sensing transcription factor and/or the oxygen level-dependent promoter is a synthetic, non-naturally occurring sequence. In some embodiments, the transcription factor regulating the mutated promoter senses the presence of certain molecules or metabolites, the presence of molecules or metabolites associated with liver damage, inflammation or an inflammatory response, or the presence of some other metabolite that may or may not be present in the gut, such as arabinose.

[0804] In some embodiments, the gene encoding a metabolic and/or satiety effector and/or immune modulator molecule is mutated to increase expression and/or stability of said molecule in low oxygen conditions, as compared to unmutated bacteria of the same subtype under the same conditions. In some embodiments, one or more of the genes in a gene cassette for producing a metabolic and/or satiety effector and/or immune modulator molecule is mutated to increase expression of said molecule in low oxygen conditions, as compared to unmutated bacteria of the same subtype under the same conditions.

[0805] Multiple Mechanisms of Action

[0806] In some embodiments, the bacteria are genetically engineered to include multiple mechanisms of action (MOAs), e.g., circuits producing multiple copies of the same product (e.g., to enhance copy number) or circuits performing multiple different functions. Examples of insertion sites include, but are not limited to, malE/K, insB/1, araC/BAD, lacZ, dapA, cea, and other shown in FIG. 57. For example, the genetically engineered bacteria may include four copies of GLP-1 inserted at four different insertion sites, e.g., malE/K, insB/I, araC/BAD, and lacZ. Alternatively, the genetically engineered bacteria may include three copies of GLP-1 inserted at three different insertion sites, e.g., malE/K, insB/I, and lacZ, and three copies of a butyrogenic gene cassette inserted at three different insertion sites, e.g., dapA, cea, and araC/BAD.

[0807] In some embodiments, the bacteria are genetically engineered to include multiple mechanisms of action (MOAs), e.g., circuits producing multiple copies of the same product (e.g., to enhance copy number) or circuits performing multiple different functions. For example, the genetically engineered bacteria may include four copies of the gene, gene(s), or gene cassettes for producing the payload(s) inserted at four different insertion sites. Alternatively, the genetically engineered bacteria may include three copies of the gene, gene(s), or gene cassettes for producing the payload(s) inserted at three different insertion sites and three copies of the gene, gene(s), or gene cassettes for producing the payload(s) inserted at three different insertion sites.

[0808] In some embodiments, the genetically engineered bacteria comprise one or more of (1) one or more gene(s) or gene cassette(s) for the production of propionate, as described herein (2) one or more gene(s) or gene cassette(s) for the production of butyrate, as described herein (3) one or more gene(s) or gene cassette(s) for the production of acetate, as described herein (4) one or more gene(s) or gene cassette(s) for the production of one or more of GLP-1 and GLP-1 analogs, as described herein (4) one or more gene(s) or gene cassette(s) for the production of one or more bile salt hydrolases, as described herein (5) one or more gene(s) or gene cassette(s) for the production of one or more transporters, e.g. for the import of bile salts and/or metabolites, e.g. tryptophan and/or tryptophan metabolites, as described herein (6) one or more polypetides for secretion, including but not limited to.GLP-1 and its analogs, bile salt hydrolases, and tryptophan synthesis and/or catabolic enzymes of the tryptophan degradation pathways, in wild type or in mutated form (for increased stability or metabolic activity) (3) one or more components of secretion machinery, as described herein (4) one or more auxotrophies, e.g., deltaThyA (5) one more more antibiotic resistances, including but not limited to, kanamycin or chloramphenicol resistance (6) one or more mutations/deletions to increase the flux through a metabolic pathway encoded by one or more genes or gene cassette(s), e.g mutations/deletions in genes in NADH consuming pathways, genes involved in feedback inhibition of a metabolic pathway encoded by the gene(s) or gene cassette(s) genes, as described herein (7) one or more mutations/deletions in one or more genes of the endogenous metabolic pathways, e.g., tryptophan synthesis pathway.

[0809] In some embodiments, under conditions where the gene, gene(s), or gene cassettes for producing the payload(s) is expressed, the genetically engineered bacteria of the disclosure produce at least about 1.5-fold, at least about 2-fold, at least about 10-fold, at least about 15-fold, at least about 20-fold, at least about 30-fold, at least about 50-fold, at least about 100-fold, at least about 200-fold, at least about 300-fold, at least about 400-fold, at least about 500-fold, at least about 600-fold, at least about 700-fold, at least about 800-fold, at least about 900-fold, at least about 1,000-fold, or at least about 1,500-fold more of the payload(s) as compared to unmodified bacteria of the same subtype under the same conditions.

[0810] In some embodiments, the genetically engineered bacteria of the invention produce at least one metabolic and/or satiety effector and/or immune modulator molecule under inducing conditions and are capable of reducing one or more symptoms of metabolic disease in a subject by at least about 5%, 10%, 20%, 30%, 40%, 50%, 60%, 70%, 80%, 90%, 95%, or more as compared to unmodified bacteria of the same subtype under the same conditions. In some embodiments, under conditions where the payload is expressed, the genetically engineered bacteria of the disclosure produce at least about 1.5-fold, at least about 2-fold, at least about 10-fold, at least about 15-fold, at least about 20-fold, at least about 30-fold, at least about 50-fold, at least about 100-fold, at least about 200-fold, at least about 300-fold, at least about 400-fold, at least about 500-fold, at least about 600-fold, at least about 700-fold, at least about 800-fold, at least about 900-fold, at least about 1,000-fold, or at least about 1,500-fold more of the payload, and/or transcript of the gene(s) in the operon as compared to unmodified bacteria of the same subtype under the same conditions.

[0811] Symptoms and manifestations of metabolic diseases may be measured by methods known in the art, e.g., glucose tolerance testing, insulin tolerance testing.

[0812] In some embodiments, the genetically engineered bacteria produce at least about 1.5-fold, at least about 2-fold, at least about 10-fold, at least about 15-fold, at least about 20-fold, at least about 30-fold, at least about 50-fold, at least about 100-fold, at least about 200-fold, at least about 300-fold, at least about 400-fold, at least about 500-fold, at least about 600-fold, at least about 700-fold, at least about 800-fold, at least about 900-fold, at least about 1,000-fold, or at least about 1,500-fold more of a metabolic and/or satiety effector and/or immune modulator molecule under inducing conditions than unmodified bacteria of the same subtype under the same conditions. Certain unmodified bacteria will not have detectable levels of the metabolic and/or satiety effector and/or immune modulator molecule. In embodiments using genetically modified forms of these bacteria, the metabolic and/or satiety effector and/or immune modulator molecule will be detectable under inducing conditions.

[0813] In certain embodiments, the metabolic and/or satiety effector and/or immune modulator molecule is butyrate. Methods of measuring butyrate levels, e.g., by mass spectrometry, gas chromatography, high-performance liquid chromatography (HPLC), are known in the art (see, e.g., Aboulnaga et al., 2013). In some embodiments, butyrate is measured as butyrate level/bacteria optical density (OD). In some embodiments, measuring the activity and/or expression of one or more gene products in the butyrogenic gene cassette serves as a proxy measurement for butyrate production. In some embodiments, the bacterial cells of the invention are harvested and lysed to measure butyrate production. In alternate embodiments, butyrate production is measured in the bacterial cell medium. In some embodiments, the genetically engineered bacteria produce at least about 1 nM/OD, at least about 10 nM/OD, at least about 100 nM/OD, at least about 500 nM/OD, at least about 1 μM/OD, at least about 10 μM/OD, at least about 100 μM/OD, at least about 500 μM/OD, at least about 1 mM/OD, at least about 2 mM/OD, at least about 3 mM/OD, at least about 5 mM/OD, at least about 10 mM/OD, at least about 20 mM/OD, at least about 30 mM/OD, or at least about 50 mM/OD of butyrate in low-oxygen conditions, in the presence of certain molecules or metabolites, in the presence of molecules or metabolites associated with liver damage, inflammation or an inflammatory response, or in the presence of some other metabolite that may or may not be present in the gut, such as arabinose.

[0814] In certain embodiments, the metabolic and/or satiety effector and/or immune modulator molecule is propionate. Methods of measuring propionate levels, e.g., by mass spectrometry, gas chromatography, high-performance liquid chromatography (HPLC), are known in the art (see, e.g., Hillman 1978; Lukovac et al., 2014). In some embodiments, measuring the activity and/or expression of one or more gene products in the propionate gene cassette serves as a proxy measurement for propionate production. In some embodiments, the bacterial cells of the invention are harvested and lysed to measure propionate production. In alternate embodiments, propionate production is measured in the bacterial cell medium. In some embodiments, the genetically engineered bacteria produce at least about 1 μM, at least about 10 μM, at least about 100 μM, at least about 500 μM, at least about 1 mM, at least about 2 mM, at least about 3 mM, at least about 5 mM, at least about 10 mM, at least about 15 mM, at least about 20 mM, at least about 30 mM, at least about 40 mM, or at least about 50 mM of propionate in low-oxygen conditions, in the presence of certain molecules or metabolites, in the presence of molecules or metabolites associated with liver damage, inflammation or an inflammatory response, or in the presence of some other metabolite that may or may not be present in the gut, such as arabinose.

[0815] In some embodiments, quantitative PCR (qPCR) is used to amplify, detect, and/or quantify mRNA expression levels of the gene, gene(s), or gene cassettes for producing the payload(s). Primers may be designed and used to detect mRNA in a sample according to methods known in the art. In some embodiments, a fluorophore is added to a sample reaction mixture that may contain payload RNA, and a thermal cycler is used to illuminate the sample reaction mixture with a specific wavelength of light and detect the subsequent emission by the fluorophore. The reaction mixture is heated and cooled to predetermined temperatures for predetermined time periods. In certain embodiments, the heating and cooling is repeated for a predetermined number of cycles. In some embodiments, the reaction mixture is heated and cooled to 90-100° C., 60-70° C., and 30-50° C. for a predetermined number of cycles. In a certain embodiment, the reaction mixture is heated and cooled to 93-97° C., 55-65° C., and 35-45° C. for a predetermined number of cycles. In some embodiments, the accumulating amplicon is quantified after each cycle of the qPCR. The number of cycles at which fluorescence exceeds the threshold is the threshold cycle (CT). At least one CT result for each sample is generated, and the CT result(s) may be used to determine mRNA expression levels of the payload(s).

[0816] In some embodiments, quantitative PCR (qPCR) is used to amplify, detect, and/or quantify mRNA expression levels of the payload(s). Primers may be designed and used to detect mRNA in a sample according to methods known in the art. In some embodiments, a fluorophore is added to a sample reaction mixture that may contain payload mRNA, and a thermal cycler is used to illuminate the sample reaction mixture with a specific wavelength of light and detect the subsequent emission by the fluorophore. The reaction mixture is heated and cooled to predetermined temperatures for predetermined time periods. In certain embodiments, the heating and cooling is repeated for a predetermined number of cycles. In some embodiments, the reaction mixture is heated and cooled to 90-100° C., 60-70° C., and 30-50° C. for a predetermined number of cycles. In a certain embodiment, the reaction mixture is heated and cooled to 93-97° C., 55-65° C., and 35-45° C. for a predetermined number of cycles. In some embodiments, the accumulating amplicon is quantified after each cycle of the qPCR. The number of cycles at which fluorescence exceeds the threshold is the threshold cycle (CT). At least one CT result for each sample is generated, and the CT result(s) may be used to determine mRNA expression levels of the payload(s).

[0817] Secretion

[0818] In some embodiments, the genetically engineered bacteria further comprise a native secretion mechanism or non-native secretion mechanism that is capable of secreting a molecule from the bacterial cytoplasm in the extracellular environment. Many bacteria have evolved sophisticated secretion systems to transport substrates across the bacterial cell envelope. Substrates, such as small molecules, proteins, and DNA, may be released into the extracellular space or periplasm (such as the gut lumen or other space), injected into a target cell, or associated with the bacterial membrane.

[0819] In Gram-negative bacteria, secretion machineries may span one or both of the inner and outer membranes. In some embodiments, the genetically engineered bacteria further comprise a non-native double membrane-spanning secretion system. Membrane-spanning secretion systems include, but are not limited to, the type I secretion system (T1SS), the type II secretion system (T2SS), the type III secretion system (T3SS), the type IV secretion system (T4SS), the type VI secretion system (T6SS), and the resistance-nodulation-division (RND) family of multi-drug efflux pumps (Pugsley 1993; Gerlach et al., 2007; Collinson et al., 2015; Costa et al., 2015; Reeves et al., 2015; WO2014138324A1, incorporated herein by reference). Examples of such secretion systems are shown in FIG. 61, FIG. 62, FIG. 63, FIG. 64, FIG. 65, FIG. 66, and FIG. 67. Mycobacteria, which have a Gram-negative-like cell envelope, may also encode a type VII secretion system (T7SS) (Stanley et al., 2003). With the exception of the T2SS, double membrane-spanning secretions generally transport substrates from the bacterial cytoplasm directly into the extracellular space or into the target cell. In contrast, the T2SS and secretion systems that span only the outer membrane may use a two-step mechanism, wherein substrates are first translocated to the periplasm by inner membrane-spanning transporters, and then transferred to the outer membrane or secreted into the extracellular space. Outer membrane-spanning secretion systems include, but are not limited to, the type V secretion or autotransporter system or autosecreter system (T5SS), the curli secretion system, and the chaperone-usher pathway for pili assembly (Saier, 2006; Costa et al., 2015).

[0820] In some embodiments, the genetically engineered bacteria of the invention further comprise a type III or a type III-like secretion system (T3SS) from Shigella, Salmonella, E. coli , Bivrio, Burkholderia, Yersinia, Chlamydia, or Pseudomonas. The T3SS is capable of transporting a protein from the bacterial cytoplasm to the host cytoplasm through a needle complex. The T3SS may be modified to secrete the molecule from the bacterial cytoplasm, but not inject the molecule into the host cytoplasm. Thus, the molecule is secreted into the gut lumen or other extracellular space. In some embodiments, the genetically engineered bacteria comprise said modified T3SS and are capable of secreting the molecule of interest from the bacterial cytoplasm. In some embodiments, the secreted molecule, such as a heterologouse protein or peptide comprises a type III secretion sequence that allows the molecule of interest o be secreted from the bacteria.

[0821] In some embodiments, a flagellar type III secretion pathway is used to secrete the molecule of interest. In some embodiments, an incomplete flagellum is used to secrete a therapeutic peptide of interest by recombinantly fusing the peptide to an N-terminal flagellar secretion signal of a native flagellar component. In this manner, the intracellularly expressed chimeric peptide can be mobilized across the inner and outer membranes into the surrounding host environment. For example, a modified flagellar type III secretion apparatus in which untranslated DNA fragment upstream of the gene fliC (encoding flagellin), e.g., a 173-bp region, is fused to the gene encoding the polypeptide of interest can be used to secrete heterologous polypeptides (See, e.g., Majander et al., Extracellular secretion of polypeptides using a modified Escherichia coli flagellar secretion apparatus. Nat Biotechnol. 2005 Apr.; 23(4):475-81). In some cases, the untranslated region from the fliC loci, may not be sufficient to mediate translocation of the passenger peptide through the flagella. Here it may be necessary to extend the N-terminal signal into the amino acid coding sequence of FliC, for example using the 173 bp of untranslated region along with the first 20 amino acids of FliC (see, e.g., Duan et al., Secretion of Insulinotropic Proteins by Commensal Bacteria: Rewiring the Gut To Treat Diabetes, Appl. Environ. Microbiol. December 2008 vol. 74 no. 23 7437-7438).

[0822] In some embodiments, a Type V Autotransporter Secretion System is used to secrete the molecule of interest, e.g., therapeutic peptide. Due to the simplicity of the machinery and capacity to handle relatively large protein fluxes, the Type V secretion system is attractive for the extracellular production of recombinant proteins. As shown in FIG. 62, a therapeutic peptide (star) can be fused to an N-terminal secretion signal, a linker, and the beta-domain of an autotransporter. The N-terminal, Sec-dependent signal sequence directs the protein to the SecA-YEG machinery which moves the protein across the inner membrane into the periplasm, followed by subsequent cleavage of the signal sequence. The Beta-domain is recruited to the Bam complex (Teta-barrel assembly machinery') where the beta-domain is folded and inserted into the outer membrane as a beta-barrel structure. The therapeutic peptide is threaded through the hollow pore of the beta-barrel structure ahead of the linker sequence. Once exposed to the extracellular environment, the therapeutic peptide can be freed from the linker system by an autocatalytic cleavage (left side of Bam complex) or by targeting of a membrane-associated peptidase (black scissors; right side of Bam complex) to a complimentary protease cut site in the linker. Thus, in some embodiments, the secreted molecule, such as a heterologous protein or peptide comprises an N-terminal secretion signal, a linker, and beta-domain of an autotransporter so as to allow the molecule to be secreted from the bacteria.

[0823] In some embodiments, a Hemolysin-based Secretion System is used to secrete the molecule of interest, e.g., therapeutic peptide. Type I Secretion systems offer the advantage of translocating their passenger peptide directly from the cytoplasm to the extracellular space, obviating the two-step process of other secretion types. FIG. 63 shows the alpha-hemolysin (HlyA) of uropathogenic Escherichia coli. This pathway uses HlyB, an ATP-binding cassette transporter; HlyD, a membrane fusion protein; and TolC, an outer membrane protein. The assembly of these three proteins forms a channel through both the inner and outer membranes. Natively, this channel is used to secrete HlyA, however, to secrete the therapeutic peptide of the present disclosure, the secretion signal-containing C-terminal portion of HlyA is fused to the C-terminal portion of a therapeutic peptide (star) to mediate secretion of this peptide.

[0824] In alternate embodiments, the genetically engineered bacteria further comprise a non-native single membrane-spanning secretion system. Single membrane-spanning transporters may act as a component of a secretion system, or may export substrates independently. Such transporters include, but are not limited to, ATP-binding cassette translocases, flagellum/virulence-related translocases, conjugation-related translocases, the general secretory system (e.g., the SecYEG complex in E. coli ), the accessory secretory system in mycobacteria and several types of Gram-positive bacteria (e.g., Bacillus anthracis, Lactobacillus johnsonii, Corynebacterium glutamicum, Streptococcus gordonii, Staphylococcus aureus), and the twin-arginine translocation (TAT) system (Saier, 2006; Rigel and Braunstein, 2008; Albiniak et al., 2013). It is known that the general secretory and TAT systems can both export substrates with cleavable N-terminal signal peptides into the periplasm, and have been explored in the context of biopharmaceutical production. The TAT system may offer particular advantages, however, in that it is able to transport folded substrates, thus eliminating the potential for premature or incorrect folding. In certain embodiments, the genetically engineered bacteria comprise a TAT or a TAT-like system and are capable of secreting the molecule of interest from the bacterial cytoplasm. One of ordinary skill in the art would appreciate that the secretion systems disclosed herein may be modified to act in different species, strains, and subtypes of bacteria, and/or adapted to deliver different payloads.

[0825] In order to translocate a protein, e.g., therapeutic polypeptide, to the extracellular space, the polypeptide must first be translated intracellularly, mobilized across the inner membrane and finally mobilized across the outer membrane. Many effector proteins (e.g., therapeutic polypeptides)—particularly those of eukaryotic origin—contain disulphide bonds to stabilize the tertiary and quaternary structures. While these bonds are capable of correctly forming in the oxidizing periplasmic compartment with the help of periplasmic chaperones, in order to translocate the polypeptide across the outer membrane the disulphide bonds must be reduced and the protein unfolded again.

[0826] One way to secrete properly folded proteins in gram-negative bacteria—particularly those requiring disulphide bonds—is to target the reducing-environment periplasm in conjunction with a destabilizing outer membrane. In this manner the protein is mobilized into the oxidizing environment and allowed to fold properly. In contrast to orchestrated extracellular secretion systems, the protein is then able to escape the periplasmic space in a correctly folded form by membrane leakage. These “leaky” gram-negative mutants are therefore capable of secreting bioactive, properly disulphide-bonded polypeptides. In some embodiments, the genetically engineered bacteria have a “leaky” or de-stabilized outer membrane. Destabilizing the bacterial outer membrane to induce leakiness can be accomplished by deleting or mutagenizing genes responsible for tethering the outer membrane to the rigid peptidoglycan skeleton, including for example, 1 pp, ompC, ompA, ompF, tolA, to1B, pal, degS, degP, and nlpI. Lpp is the most abundant polypeptide in the bacterial cell existing at ˜500,000 copies per cell and functions as the primary ‘staple’ of the bacterial cell wall to the peptidoglycan. 1.

[0827] Silhavy, T. J., Kahne, D. & Walker, S. The bacterial cell envelope. Cold Spring Harb Perspect Biol 2, a000414 (2010). To1A-PAL and OmpA complexes function similarly to Lpp and are other deletion targets to generate a leaky phenotype. Additionally, leaky phenotypes have been observed when periplasmic proteases are inactivated. The periplasm is very densely packed with protein and therefore encode several periplasmic proteins to facilitate protein turnover. Removal of periplasmic proteases such as degS, degP or nlpI can induce leaky phenotypes by promoting an excessive build-up of periplasmic protein. Mutation of the proteases can also preserve the effector polypeptide by preventing targeted degradation by these proteases. Moreover, a combination of these mutations may synergistically enhance the leaky phenotype of the cell without major sacrifices in cell viability. Thus, in some embodiments, the engineered bacteria have one or more deleted or mutated membrane genes. In some embodiments, the engineered bacteria have a deleted or mutated 1 pp gene. In some embodiments, the engineered bacteria have one or more deleted or mutated gene(s), selected from ompA, ompA, and ompF genes. In some embodiments, the engineered bacteria have one or more deleted or mutated gene(s), selected from tolA, to1B, and pal genes. in some embodiments, the engineered bacteria have one or more deleted or mutated periplasmic protease genes. In some embodiments, the engineered bacteria have one or more deleted or mutated periplasmic protease genes selected from degS, degP, and nlp1. In some embodiments, the engineered bacteria have one or more deleted or mutated gene(s), selected from 1pp, ompA, ompF, to1 A, to1B, pal, degS, degP, and nlpl genes.

[0828] To minimize disturbances to cell viability, the leaky phenotype can be made inducible by placing one or more membrane or periplasmic protease genes, e.g., selected from 1 pp, ompA, ompF, to1A, to1B, pa1, degS, degP, and nlp1, under the control of an inducible promoter. For example, expression of 1 pp or other cell wall stability protein or periplasmic protease can be repressed in conditions where the therapeutic polypeptide needs to be delivered (secreted). For instance, under inducing conditions a transcriptional repressor protein or a designed antisense RNA can be expressed which reduces transcription or translation of a target membrane or periplasmic protease gene. Conversely, overexpression of certain peptides can result in a destabilized phenotype, e.g., over expression of colicins or the third topological domain of To1A, which peptide overexpression can be induced in conditions in which the therapeutic polypeptide needs to be delivered (secreted). These sorts of strategies would decouple the fragile, leaky phenotypes from biomass production. Thus, in some embodiments, the engineered bacteria have one or more membrane and/or periplasmic protease genes under the control of an inducible promoter.

[0829] The Table 25 and Table 26 below lists secretion systems for Gram positive bacteria and Gram negative bacteria.

TABLE 25
Secretion systems for gram positive bacteria

| Bacterial Strain | Relevant Secretion System |
|---|---|
| C. novyi-NT (Gram+) | Sec pathway |
| | Twin-arginine (TAT) pathway |
| C. butryicum (Gram+) | Sec pathway |
| | Twin-arginine (TAT) pathway |
| Listeria monocytogenes (Gram+) | Sec pathway |
| | Twin-arginine (TAT) pathway |

TABLE 26
Secretion Systems for Gram negative bacteria
Protein secretary pathways (SP) in gram-negative bacteria and their descendants

| | | | | | | | |
|---|---|---|---|---|---|---|---|
| | | | | | | # | |
| Type | | | | | | Proteins/ | Energy |
| (Abbreviation) | Name | TC#² | Bacteria | Archaea | Eukarya | System | Source |

IMPS - Gram-negative bacterial inner membrane channel-forming translocases

| | | | | | | | |
|---|---|---|---|---|---|---|---|
| ABC (SIP) | ATP binding | 3.A.1 | + | + | + | 3-4 | ATP |
| | cassette | | | | | | |
| | translocase | | | | | | |
| SEC (IISP) | General secretory | 3.A.5 | + | + | + | ~12 | GTP OR |
| | translocase | | | | | | ATP + PMF |
| Fla/Path (IIISP) | Flagellum/ | 3.A.6 | + | − | − | >10 | ATP |
| | virulence- | | | | | | |
| | related translocase | | | | | | |
| Conj (IVSP) | Conjugation-related | 3.A.7 | + | − | − | >10 | ATP |
| | translocase | | | | | | |
| Tat (IISP) | Twin-arginine | 2.A.64 | + | + | + | 2-4 | PMF |
| | targeting | | | | (chloroplasts) | | |
| | translocase | | | | | | |
| Oxa1 (YidC) | Cytochrome oxidase | 2.A.9 | + | + | + | 1 | None |
| | biogenesis family | | | | (mitochondria | | or |
| | | | | | chloroplasts) | | PMF |
| MscL | Large conductance | 1.A.22 | + | + | + | 1 | None |
| | mechanosensitive | | | | | | |
| | channel family | | | | | | |
| Holins | Holin functional | 1.E.1•21 | + | − | − | 1 | None |
| | superfamily | | | | | | |

Eukaryotic Organelles

| | | | | | | | |
|---|---|---|---|---|---|---|---|
| MPT | Mitochondria 1 | 3.A.B | − | − | + | >20 | ATP |
| | protein translocase | | | | (mitochondrial) | | |
| CEPT | Chloroplast envelope | 3.A.9 | (+) | − | + | ≥3 | GTP |
| | protein translocase | | | | (chloroplasts) | | |
| Bcl-2 | Eukaryotic Bcl-2 | 1.A.21 | − | − | + | 1? | None |
| | family (programmed | | | | | | |
| | cell death) | | | | | | |

Gram-negative bacterial outer membrane channel-forming translocases

| | | | | | | | |
|---|---|---|---|---|---|---|---|
| MTB (IISP) | Main terminal | 3.A.15 | +^{b} | − | − | ~14 | ATP; |
| | branch of the | | | | | | PMF |
| | general secretory | | | | | | |
| | translocase | | | | | | |
| FUP AT-1 | Fimbrial | 1.B.11 | +^{b} | − | − | 1 | None |
| | usher protein | 1.B.12 | +^{b} | | − | 1 | None |
| | Autotransporter-1 | | | | | | |
| AT-2 OMF (ISP) | Autotransporter-2 | 1.B.40 | +^{b} | − | − | 1 | None |
| | | 1.B.17 | +^{b} | | +(?) | 1 | None |
| TPS Secretin | | 1.B.20 | + | − | + | 1 | None |
| (IISP and IISP) | | 1.B.22 | +^{b} | | − | 1 | None |
| OmpIP | Outer membrane | 1.B.33 | + | − | + | ≥4 | None? |
| | insertion porin | | | | (mitochondria; | | |
| | | | | | chloroplasts) | | |

[0830] The above tables for gram positive and gram negative bacteria list secretion systems that can be used to secrete polypeptides and other molecules from the engineered bacteria, which are reviewed in Milton H. Saier, Jr. Microbe/Volume 1, Number 9, 2006 “Protein Secretion Systems in Gram-Negative Bacteria Gram-negative bacteria possess many protein secretion-membrane insertion systems that apparently evolved independently”, the contents of which is herein incorporated by reference in its entirety.

[0831] Any of the secretion systems described herein may according to the disclosure be employed to secrete the proteins of interest. Non-limiting examples of proteins of interest include GLP-1 peptides, GLP-1 analogs, GLP-2 peptides, IL-22, vIL-10, hIL-10, monomerized IL-10, IL-27, IL-19, IL-20, IL-24, tryptophan synthesis enzymes, SCFA biosynthesis enzymes, tryptophan catabolic enzymes, e.g. in the indole pathway and/or the kynurenine pathway, and bile salt hydrolases, as described herein. These polypeptides may be mutated to increase stability, resistance to protease digestion, and/or activity.

TABLE 27
Comparison of Secretion systems for secretion of polypeptide from
engineered bacteria

| Secretion | | | | |
|---|---|---|---|---|
| System | Tag | Cleavage | Advantages | Other features |
| Modified | mRNA | No | No peptide tag | May not be as |
| Type III | (or N- | cleavage | Endogenous | suited for larger |
| (flagellar) | terminal) | necessary | | proteins Deletion |
| | | | | of flagellar genes |
| Type V | N- and | Yes | Large proteins | 2-step secretion |
| autotransport | C- | | Endogenous | |
| | terminal | | Cleavable | |
| Type I | C- | No | | Tag; Exogenous |
| | terminal | | | Machinery |
| Diffusible | N- | Yes | Disulfide bond | May affect cell |
| Outer | terminal | | formation | fragility/ |
| Membrane | | | | survivability/ |
| (DOM) | | | | growth/yield |

[0832] In some embodiments, the therapeutic polypeptides of interest are secreted using components of the flagellar type III secretion system. In a non-limiting example, such a therapeutic polypeptide of interest, such as, one or more GLP-1 peptides, GLP-1 analogs, GLP-2 peptides, IL-22, vIL-10, hIL-10, monomerized IL-10, IL-27, IL-19, IL-20, IL-24, tryptophan synthesis enzymes, SCFA biosynthesis enzymes, tryptophan catabolic enzymes, and/or bile salt hydrolases, is assembled behind a fliC-5′UTR (e.g., 173-bp untranslated region from the fliC loci), and is driven by the native promoter. In other embodiments, the expression of the therapeutic peptide of interested secreted using components of the flagellar type III secretion system is driven by a tet-inducible promoter. In alternate embodiments, an inducible promoter such as oxygen level-dependent promoters (e.g., FNR-inducible promoter), promoters induced by inflammation or an inflammatory response (RNS, ROS promoters), and promoters induced by a metabolite that may or may not be naturally present (e.g., can be exogenously added) in the gut, e.g., arabinose is used. Alternatively, a promoter that is inducible in vitro, e.g., under cell culture, cell production/maufacturing conditions, as described herein and known in the art, can be used. Alternatively, a promoter that is inducible in vitro, e.g., under cell culture, cell production/maufacturing and in vivo conditions, described herein and known in the art, can be used. In other embodiments, a constitutive promoter can be used. In some embodiments, the therapeutic polypeptide of interest is expressed from a plasmid (e.g., a medium copy plasmid). In some embodiments, the therapeutic polypeptide of interest is expressed from a construct which is integrated into fliC locus (thereby deleting fliC), where it is driven by the native FliC promoter. In some embodiments, an N terminal part of FliC (e.g., the first 20 amino acids of FliC) is included in the construct, to further increase secretion efficiency.

[0833] In some embodiments, the therapeutic polypeptides of interest, e.g., such as, one or more GLP-1 peptides, GLP-1 analogs, GLP-2 peptides, IL-22, vIL-10, hIL-10, monomerized IL-10, IL-27, IL-19, IL-20, IL-24, tryptophan synthesis enzymes, SCFA biosynthesis enzymes, and/or tryptophan catabolic enzymes, and/or bile salt hydrolases, are secreted using via a diffusible outer membrane (DOM) system. In some embodiments, the therapeutic polypeptide of interest is fused to a N-terminal Sec-dependent secretion signal. Non-limiting examples of such N-terminal Sec-dependent secretion signals include PhoA, OmpF, OmpA, and cvaC. In alternate embodiments, the therapeutic polypeptide of interest is fused to a Tat-dependent secretion signal. Exemplary Tat-dependent tags include TorA, FdnG, and DmsA. In some embodiments, expression of the secretion-tagged therapeutic protein is driven by a tet promoter or an inducible promoter, such as oxygen level-dependent promoters (e.g., FNR-inducible promoter), or by promoters induced by molecules specific to certain metabolic conditions, or promoters induced by inflammation or an inflammatory response (RNS, ROS promoters), and promoters induced by a metabolite that may or may not be naturally present (e.g., can be exogenously added) in the gut, e.g., arabinose. Alternatively, a promoter that is inducible in vitro, e.g., under cell culture, cell production/maufacturing conditions, as described herein and known in the art, can be used. Alternatively, a promoter that is inducible in vitro, e.g., under cell culture, cell production/maufacturing and in vivo conditions, described herein and known in the art, can be used. In other embodiments, a constitutive promoter can be used. In some embodiments, the secretion-tagged therapeutic polypeptide of interest is expressed from a plasmid (e.g., a medium copy plasmid). In other embodiments, the therapeutic polypeptide of interest is expressed from a construct which is integrated into the bacterial chromosome, e.g., at one or more of the integration sites shown in FIG. 57. In certain embodiments, the genetically engineered bacteria comprise deletions or mutations in one or more of the outer membrane and/or periplasmic proteins. Non-limiting examples of such proteins, one or more of which may be deleted or mutated, include 1pp, pal, to1A, and/or nlpI. In some embodiments, 1 pp is deleted or mutated. In some embodiments, pal is deleted or mutated. In some embodiments, to1 A is deleted or mutated. In other embodiments, nlpl is deleted or mutated. In yet other embodiments, certain periplasmic proteases are deleted or mutated, e.g., to increase stability of the polypeptide in the periplasm. Non-limiting examples of such proteases include degP and ompT. In some embodiments, degP is deleted or mutated. In some embodiments, ompT is deleted or mutated. In some embodiments, degP and ompT are deleted or mutated.

[0834] In some embodiments, the therapeutic polypeptides of interest, e.g., GLP-1, GLP-1 peptides, GLP-2 peptides, GLP-2 analogs, IL-22, vIL-10, hIL-10, monomerized IL-10, IL-27, IL-19, IL-20, IL-24, SCFA producing enzymes, Tryptophan catabolism enzymes, and/or bile salt hydrolases are secreted via a Type V Auto-secreter (pic Protein) Secretion. In some embodimetns, the therapeutic protein of interest is expressed as a fusion protein with the native Nissle auto-secreter E. coli_01635 (where the original passenger protein is replaced with the therapeutic polypeptides of interest.

[0835] In some embodiments, the therapeutic polypeptides of interest, e.g., GLP-1, GLP-1 peptides, GLP-2 peptides, GLP-2 analogs, IL-22, vIL-10, hIL-10, monomerized IL-10, IL-27, IL-19, IL-20, IL-24, SCFA producing enzymes, tryptophan catabolism enzymes, and/or bile salt hydrolases are secreted via Type I Hemolysin Secretion. In one embodiment, therapeutic polypeptide of interest is expressed as fusion protein with the 53 amino acids of the C terminus of alpha-hemolysin (hlyA) of E. coli CFT073.

[0836] Essential Genes and Auxotrophs

[0837] As used herein, the term “essential gene” refers to a gene which is necessary to for cell growth and/or survival. Bacterial essential genes are well known to one of ordinary skill in the art, and can be identified by directed deletion of genes and/or random mutagenesis and screening (see, e.g., Zhang and Lin, 2009, DEG 5.0, a database of essential genes in both prokaryotes and eukaryotes, Nucl. Acids Res., 37:D455-D458 and Gerdes et al., Essential genes on metabolic maps, Curr. Opin. Biotechnol., 17(5):448-456, the entire contents of each of which are expressly incorporated herein by reference).

[0838] An “essential gene” may be dependent on the circumstances and environment in which an organism lives. For example, a mutation of, modification of, or excision of an essential gene may result in the genetically engineered bacteria of the disclosure becoming an auxotroph. An auxotrophic modification is intended to cause bacteria to die in the absence of an exogenously added nutrient essential for survival or growth because they lack the gene(s) necessary to produce that essential nutrient.

[0839] An auxotrophic modification is intended to cause bacteria to die in the absence of an exogenously added nutrient essential for survival or growth because they lack the gene(s) necessary to produce that essential nutrient. In some embodiments, any of the genetically engineered bacteria described herein also comprise a deletion or mutation in a gene required for cell survival and/or growth. In one embodiment, the essential gene is a DNA synthesis gene, for example, thyA. In another embodiment, the essential gene is a cell wall synthesis gene, for example, dapA. In yet another embodiment, the essential gene is an amino acid gene, for example, serA or MetA. Any gene required for cell survival and/or growth may be targeted, including but not limited to, cysE, glnA, ilvD, leuB, lysA, serA, metA, glyA, hisB, ilvA, pheA, proA, thrC, trpC, tyrA, thyA, uraA, dapA, dapB, dapD, dapE, dapF, flhD, metB, metC, proAB, and thi1, as long as the corresponding wild-type gene product is not produced in the bacteria.

[0840] Table 28 lists depicts exemplary bacterial genes which may be disrupted or deleted to produce an auxotrophic strain. These include, but are not limited to, genes required for oligonucleotide synthesis, amino acid synthesis, and cell wall synthesis.

TABLE 28
Non-limiting Examples of Bacterial Genes Useful for Generation of an
Auxotroph

| Amino Acid | Oligonucleotide | Cell Wall |
|---|---|---|
| cysE | thyA | dapA |
| glnA | uraA | dapB |
| ilvD | | dapD |
| leuB | | dapE |
| lysA | | dapF |
| serA | | |
| metA | | |
| glyA | | |
| hisB | | |
| ilvA | | |
| pheA | | |
| proA | | |
| thrC | | |
| trpC | | |
| tyrA | | |

[0841] Table 29 shows the survival of various amino acid auxotrophs in the mouse gut, as detected 24 hrs and 48 hrs post-gavage. These auxotrophs were generated using BW25113, a non-Nissle strain of E. coli.

TABLE 29
Survival of amino acid auxotrophs in the mouse gut

| Gene | AA Auxotroph | Pre-Gavage | 24 hours | 48 hours |
|---|---|---|---|---|
| argA | Arginine | Present | Present | Absent |
| cysE | Cysteine | Present | Present | Absent |
| glnA | Glutamine | Present | Present | Absent |
| glyA | Glycine | Present | Present | Absent |
| hisB | Histidine | Present | Present | Present |
| ilvA | Isoleucine | Present | Present | Absent |
| leuB | Leucine | Present | Present | Absent |
| lysA | Lysine | Present | Present | Absent |
| metA | Methionine | Present | Present | Present |
| pheA | Phenylalanine | Present | Present | Present |
| proA | Proline | Present | Present | Absent |
| serA | Serine | Present | Present | Present |
| thrC | Threonine | Present | Present | Present |
| trpC | Tryptophan | Present | Present | Present |
| tyrA | Tyrosine | Present | Present | Present |
| ilvD | Valine/Isoleucine/ | Present | Present | Absent |
| | Leucine | | | |
| thyA | Thiamine | Present | Absent | Absent |
| uraA | Uracil | Present | Absent | Absent |
| flhD | FlhD | Present | Present | Present |

[0842] For example, thymine is a nucleic acid that is required for bacterial cell growth; in its absence, bacteria undergo cell death. The thyA gene encodes thimidylate synthetase, an enzyme that catalyzes the first step in thymine synthesis by converting dUMP to dTMP (Sat et al., 2003). In some embodiments, the bacterial cell of the disclosure is a thyA auxotroph in which the thyA gene is deleted and/or replaced with an unrelated gene. A thyA auxotroph can grow only when sufficient amounts of thymine are present, e.g., by adding thymine to growth media in vitro, or in the presence of high thymine levels found naturally in the human gut in vivo. In some embodiments, the bacterial cell of the disclosure is auxotrophic in a gene that is complemented when the bacterium is present in the mammalian gut. Without sufficient amounts of thymine, the thyA auxotroph dies. In some embodiments, the auxotrophic modification is used to ensure that the bacterial cell does not survive in the absence of the auxotrophic gene product (e.g., outside of the gut).

[0843] Diaminopimelic acid (DAP) is an amino acid synthetized within the lysine biosynthetic pathway and is required for bacterial cell wall growth (Meadow et al., 1959; Clarkson et al., 1971). In some embodiments, any of the genetically engineered bacteria described herein is a dapD auxotroph in which dapD is deleted and/or replaced with an unrelated gene. A dapD auxotroph can grow only when sufficient amounts of DAP are present, e.g., by adding DAP to growth media in vitro. Without sufficient amounts of DAP, the dapD auxotroph dies. In some embodiments, the auxotrophic modification is used to ensure that the bacterial cell does not survive in the absence of the auxotrophic gene product (e.g., outside of the gut).

[0844] In other embodiments, the genetically engineered bacterium of the present disclosure is a uraA auxotroph in which uraA is deleted and/or replaced with an unrelated gene. The uraA gene codes for UraA, a membrane-bound transporter that facilitates the uptake and subsequent metabolism of the pyrimidine uracil (Andersen et al., 1995). A uraA auxotroph can grow only when sufficient amounts of uracil are present, e.g., by adding uracil to growth media in vitro. Without sufficient amounts of uracil, the uraA auxotroph dies. In some embodiments, auxotrophic modifications are used to ensure that the bacteria do not survive in the absence of the auxotrophic gene product (e.g., outside of the gut).

[0845] In complex communities, it is possible for bacteria to share DNA. In very rare circumstances, an auxotrophic bacterial strain may receive DNA from a non-auxotrophic strain, which repairs the genomic deletion and permanently rescues the auxotroph. Therefore, engineering a bacterial strain with more than one auxotroph may greatly decrease the probability that DNA transfer will occur enough times to rescue the auxotrophy. In some embodiments, the genetically engineered bacteria of the invention comprise a deletion or mutation in two or more genes required for cell survival and/or growth.

[0846] Other examples of essential genes include, but are not limited to yhbV, yagG, hemB, secD, secF, ribD, ribE, thiL, dxs, ispA, dnaX, adk, hemH, 1pxH, cysS, fold, rplT, infC, thrS, nadE, gapA, yeaZ, aspS, argS, pgsA, yefM, metG, folE, yejM, gyrA, nrdA, nrdB, folC, accD, fabB, gltX, ligA, zipA, dapE, dapA, der, hisS, ispG, suhB, tadA, acpS, era, mc, ftsB, eno, pyrG, chpR, lgt, fbaA, pgk, yqgD, metK, yqgF, plsC, ygiT, pare, ribB, cca, ygjD, tdcF, yraL, yihA, ftsN, murl, murB, birA, secE, nusG, rp1J, rp1L, rpoB, rpoC, ubiA, plsB, lexA, dnaB, ssb, alsK, groS, psd, orn, yjeE, rpsR, chpS, ppa, valS, yjgP, yjgQ, dnaC, ribF, 1spA, ispH, dapB, folA, imp, yabQ, ftsL, ftsI, murE, murF, mraY, murD, ftsW, murG, murC, ftsQ, ftsA, ftsZ, 1pxC, secM, secA, can, folK, hemL, yadR, dapD, map, rpsB, infB ,nusA, ftsH, obgE, rpmA, rplU, ispB, murA, yrbB, yrbK, yhbN, rpsl, rplM, degS, mreD, mreC, mreB, accB, accC, yrdC, def, fmt, rplQ, rpoA, rpsD, rpsK, rpsM, entD, mrdB, mrdA, nadD, hlepB, rpoE, pssA, yfiO, rplS, trmD, rpsP, ffh, grpE, yfjB, csrA, ispF, ispD, rplW, rp1D, rplC, rpsJ, fusA, rpsG, rpsL, trpS, yrfF, asd, rpoH, ftsX, ftsE, ftsY, frr, dxr, ispU, rfaK, kdtA, coaD, rpmB, dfp, dut, gmk, spot, gyrB, dnaN, dnaA, rpmH, rnpA, yidC, tnaB, glmS, glmU, wzyE, hemD, hemC, yigP, ubiB, ubiD, hemG, secY, rp10, rpmD, rpsE, rplR, rplF, rpsH, rpsN, rplE, rp1X, rp1N, rpsQ, rpmC, rp1P, rpsC, rplV, rpsS, rplB, cdsA, yaeL, yaeT, 1pxD, fabZ, 1pxA, 1pxB, dnaE, accA, tilS, proS, yafF, tsf, pyrH, olA, rlpB, leuS, lnt, glnS, fldA, cydA, infA, cydC, ftsK, lolA, serS, rpsA, msbA, 1pxK, kdsB, mukF, mukE, mukB, asnS, fabA, mviN, me, yceQ, fabD, fabG, acpP, tmk, holB, 1o1C, 1o1D, 1o1E, purB, ymfK, minE, mind, pth, rsA, ispE, 1o1B, hemA, prfA, prmC, kdsA, topA, ribA, fabI, racR, dicA, ydfB, tyrS, ribC, ydiL, pheT, pheS, yhhQ, bcsB, glyQ, yibJ, and gpsA. Other essential genes are known to those of ordinary skill in the art.

[0847] In some embodiments, the genetically engineered bacterium of the present disclosure is a synthetic ligand-dependent essential gene (SLiDE) bacterial cell. SLiDE bacterial cells are synthetic auxotrophs with a mutation in one or more essential genes that only grow in the presence of a particular ligand (see Lopez and Anderson “Synthetic Auxotrophs with Ligand-Dependent Essential Genes for a BL21 (DE3 Biosafety Strain, ”ACS Synthetic Biology (2015) DOI: 10.102¹/ₐcssynbio.5b00085, the entire contents of which are expressly incorporated herein by reference).

[0848] In some embodiments, the SLiDE bacterial cell comprises a mutation in an essential gene. In some embodiments, the essential gene is selected from the group consisting of pheS, dnaN, tyrS, metG, and adk. In some embodiments, the essential gene is dnaN comprising one or more of the following mutations: H191N, R240C, I317S, F319V, L340T, V347I, and S345C. In some embodiments, the essential gene is dnaN comprising the mutations H191N, R240C, I317S, F319V, L340T, V347I, and S345C. In some embodiments, the essential gene is pheS comprising one or more of the following mutations: F125G, P183T, P184A, R186A, and I188L. In some embodiments, the essential gene is pheS comprising the mutations F125G, P183T, P184A, R186A, and I188L. In some embodiments, the essential gene is tyrS comprising one or more of the following mutations: L36V, C38A and F40G. In some embodiments, the essential gene is tyrS comprising the mutations L36V, C38A and F40G. In some embodiments, the essential gene is metG comprising one or more of the following mutations: E45Q, N47R, I49G, and A51C. In some embodiments, the essential gene is metG comprising the mutations E45Q, N47R, I49G, and A51C. In some embodiments, the essential gene is adk comprising one or more of the following mutations: I4L, L5I and L6G. In some embodiments, the essential gene is adk comprising the mutations I4L, L5I and L6G.

[0849] In some embodiments, the genetically engineered bacterium is complemented by a ligand. In some embodiments, the ligand is selected from the group consisting of benzothiazole, indole, 2-aminobenzothiazole, indole-3-butyric acid, indole-3-acetic acid, and L-histidine methyl ester. For example, bacterial cells comprising mutations in metG (E45Q, N47R, I49G, and A51C) are complemented by benzothiazole, indole, 2-aminobenzothiazole, indole-3-butyric acid, indole-3-acetic acid or L-histidine methyl ester. Bacterial cells comprising mutations in dnaN (H191N, R240C, I317S, F319V, L340T, V347I, and S345C) are complemented by benzothiazole, indole or 2-aminobenzothiazole. Bacterial cells comprising mutations in pheS (F125G, P183T, P184A, R186A, and I188L) are complemented by benzothiazole or 2-aminobenzothiazole. Bacterial cells comprising mutations in tyrS (L36V, C38A, and F40G) are complemented by benzothiazole or 2-aminobenzothiazole. Bacterial cells comprising mutations in adk (I4L, L5I and L6G) are complemented by benzothiazole or indole.

[0850] In some embodiments, the genetically engineered bacterium comprises more than one mutant essential gene that renders it auxotrophic to a ligand. In some embodiments, the bacterial cell comprises mutations in two essential genes. For example, in some embodiments, the bacterial cell comprises mutations in tyrS (L36V, C38A, and F40G) and metG (E45Q, N47R, I49G, and A51C). In other embodiments, the bacterial cell comprises mutations in three essential genes. For example, in some embodiments, the bacterial cell comprises mutations in tyrS (L36V, C38A, and F40G), metG (E45Q, N47R, I49G, and A51C), and pheS (F125G, P183T, P184A, R186A, and I188L).

[0851] In some embodiments, the genetically engineered bacterium is a conditional auxotroph whose essential gene(s) is replaced using the arabinose system shown in FIG. 68.

[0852] In some embodiments, the genetically engineered bacterium of the disclosure is an auxotroph and also comprises kill-switch circuitry, such as any of the kill-switch components and systems described herein. For example, the genetically engineered bacteria may comprise a deletion or mutation in an essential gene required for cell survival and/or growth, for example, in a DNA synthesis gene, for example, thyA, cell wall synthesis gene, for example, dapA and/or an amino acid gene, for example, serA or MetA and may also comprise a toxin gene that is regulated by one or more transcriptional activators that are expressed in response to an environmental condition(s) and/or signal(s) (such as the described arabinose system) or regulated by one or more recombinases that are expressed upon sensing an exogenous environmental condition(s) and/or signal(s) (such as the recombinase systems described herein). Other embodiments are described in Wright et al., “GeneGuard: A Modular Plasmid System Designed for Biosafety,” ACS Synthetic Biology (2015) 4: 307-16, the entire contents of which are expressly incorporated herein by reference). In some embodiments, the genetically engineered bacterium of the disclosure is an auxotroph and also comprises kill-switch circuitry, such as any of the kill-switch components and systems described herein, as well as another biosecurity system, such a conditional origin of replication (Wright et al., 2015). In other embodiments, auxotrophic modifications may also be used to screen for mutant bacteria that produce the metabolic or satiety effector and/or immune modulator molecule.

[0853] Genetic Regulatory Circuits

[0854] In some embodiments, the genetically engineered bacteria comprise multi-layered genetic regulatory circuits for expressing the constructs described herein (see, e.g., U.S. Provisional Application No. 62/184,811, incorporated herein by reference in its entirety). The genetic regulatory circuits are useful to screen for mutant bacteria that produce a metabolic or satiety effector and/or immune modulator molecule or rescue an auxotroph. In certain embodiments, the invention provides methods for selecting genetically engineered bacteria that produce one or more genes of interest.

[0855] In some embodiments, the invention provides genetically engineered bacteria comprising a gene or gene cassette for producing a metabolic or satiety effector and/or immune modulator molecule and a T7 polymerase-regulated genetic regulatory circuit. For example, the genetically engineered bacteria comprise a first gene encoding a T7 polymerase, wherein the first gene is operably linked to a fumarate and nitrate reductase regulator (FNR)-responsive promoter; a second gene or gene cassette for producing a metabolic or satiety effector and/or immune modulator molecule, wherein the second gene or gene cassette is operably linked to a T7 promoter that is induced by the T7 polymerase; and a third gene encoding an inhibitory factor, lysY, that is capable of inhibiting the T7 polymerase. In the presence of oxygen, FNR does not bind the FNR-responsive promoter, and the metabolic or satiety effector and/or immune modulator molecule is not expressed. LysY is expressed constitutively (P-lac constitutive) and further inhibits T7 polymerase. In the absence of oxygen, FNR dimerizes and binds to the FNR-responsive promoter, T7 polymerase is expressed at a level sufficient to overcome lysY inhibition, and the metabolic or satiety effector and/or immune modulator molecule is expressed. In some embodiments, the lysY gene is operably linked to an additional FNR binding site. In the absence of oxygen, FNR dimerizes to activate T7 polymerase expression as described above, and also inhibits lysY expression.

[0856] In some embodiments, the invention provides genetically engineered bacteria comprising a gene or gene cassette for producing a metabolic or satiety effector and/or immune modulator molecule and a protease-regulated genetic regulatory circuit. For example, the genetically engineered bacteria comprise a first gene encoding an mf-lon protease, wherein the first gene is operably linked to a FNR-responsive promoter; a second gene or gene cassette for producing a metabolic or satiety effector and/or immune modulator molecule operably linked to a tet regulatory region (tetO); and a third gene encoding an mf-lon degradation signal linked to a tet repressor (tetR), wherein the tetR is capable of binding to the tet regulatory region and repressing expression of the second gene or gene cassette. The mf-lon protease is capable of recognizing the mf-lon degradation signal and degrading the tetR. In the presence of oxygen, FNR does not bind the FNR-responsive promoter, the repressor is not degraded, and the metabolic or satiety effector and/or immune modulator molecule is not expressed. In the absence of oxygen, FNR dimerizes and binds the FNR-responsive promoter, thereby inducing expression of mf-lon protease. The mf-lon protease recognizes the mf-lon degradation signal and degrades the tetR, and the metabolic or satiety effector and/or immune modulator molecule is expressed.

[0857] In some embodiments, the invention provides genetically engineered bacteria comprising a gene or gene cassette for producing a metabolic or satiety effector and/or immune modulator molecule and a repressor-regulated genetic regulatory circuit. For example, the genetically engineered bacteria comprise a first gene encoding a first repressor, wherein the first gene is operably linked to a FNR-responsive promoter; a second gene or gene cassette for producing a metabolic or satiety effector and/or immune modulator molecule operably linked to a first regulatory region comprising a constitutive promoter; and a third gene encoding a second repressor, wherein the second repressor is capable of binding to the first regulatory region and repressing expression of the second gene or gene cassette. The third gene is operably linked to a second regulatory region comprising a constitutive promoter, wherein the first repressor is capable of binding to the second regulatory region and inhibiting expression of the second repressor. In the presence of oxygen, FNR does not bind the FNR-responsive promoter, the first repressor is not expressed, the second repressor is expressed, and the metabolic or satiety effector and/or immune modulator molecule is not expressed. In the absence of oxygen, FNR dimerizes and binds the FNR-responsive promoter, the first repressor is expressed, the second repressor is not expressed, and the metabolic or satiety effector and/or immune modulator molecule is expressed.

[0858] Examples of repressors useful in these embodiments include, but are not limited to, ArgR, TetR, ArsR, AscG, LacI, CscR, DeoR, DgoR, FruR, GaIR, GatR, CI, LexA, RafR, QacR, and PtxS (US20030166191).

[0859] In some embodiments, the invention provides genetically engineered bacteria comprising a gene or gene cassette for producing a metabolic or satiety effector and/or immune modulator molecule and a regulatory RNA-regulated genetic regulatory circuit. For example, the genetically engineered bacteria comprise a first gene encoding a regulatory RNA, wherein the first gene is operably linked to a FNR-responsive promoter, and a second gene or gene cassette for producing a metabolic or satiety effector and/or immune modulator molecule. The second gene or gene cassette is operably linked to a constitutive promoter and further linked to a nucleotide sequence capable of producing an mRNA hairpin that inhibits translation of the metabolic or satiety effector and/or immune modulator molecule. The regulatory RNA is capable of eliminating the mRNA hairpin and inducing translation via the ribosomal binding site. In the presence of oxygen, FNR does not bind the FNR-responsive promoter, the regulatory RNA is not expressed, and the mRNA hairpin prevents the metabolic or satiety effector and/or immune modulator molecule from being translated. In the absence of oxygen, FNR dimerizes and binds the FNR-responsive promoter, the regulatory RNA is expressed, the mRNA hairpin is eliminated, and the metabolic or satiety effector and/or immune modulator molecule is expressed.

[0860] In some embodiments, the invention provides genetically engineered bacteria comprising a gene or gene cassette for producing a metabolic or satiety effector and/or immune modulator molecule and a CRISPR-regulated genetic regulatory circuit. For example, the genetically engineered bacteria comprise a Cas9 protein; a first gene encoding a CRISPR guide RNA, wherein the first gene is operably linked to a FNR-responsive promoter; a second gene or gene cassette for producing a metabolic or satiety effector and/or immune modulator molecule, wherein the second gene or gene cassette is operably linked to a regulatory region comprising a constitutive promoter; and a third gene encoding a repressor operably linked to a constitutive promoter, wherein the repressor is capable of binding to the regulatory region and repressing expression of the second gene or gene cassette. The third gene is further linked to a CRISPR target sequence that is capable of binding to the CRISPR guide RNA, wherein said binding to the CRISPR guide RNA induces cleavage by the Cas9 protein and inhibits expression of the repressor. In the presence of oxygen, FNR does not bind the FNR-responsive promoter, the guide RNA is not expressed, the repressor is expressed, and the metabolic or satiety effector and/or immune modulator molecule is not expressed. In the absence of oxygen, FNR dimerizes and binds the FNR-responsive promoter, the guide RNA is expressed, the repressor is not expressed, and the metabolic or satiety effector and/or immune modulator molecule is expressed.

[0861] In some embodiments, the invention provides genetically engineered bacteria comprising a gene or gene cassette for producing a metabolic or satiety effector and/or immune modulator molecule and a recombinase-regulated genetic regulatory circuit. For example, the genetically engineered bacteria comprise a first gene encoding a recombinase, wherein the first gene is operably linked to a FNR-responsive promoter, and a second gene or gene cassette for producing a metabolic or satiety effector and/or immune modulator molecule operably linked to a constitutive promoter. The second gene or gene cassette is inverted in orientation (3′ to 5′) and flanked by recombinase binding sites, and the recombinase is capable of binding to the recombinase binding sites to induce expression of the second gene or gene cassette by reverting its orientation (5′ to 3′). In the presence of oxygen, FNR does not bind the FNR-responsive promoter, the recombinase is not expressed, the gene or gene cassette remains in the 3′ to 5′ orientation, and no functional metabolic or satiety effector and/or immune modulator molecule is produced. In the absence of oxygen, FNR dimerizes and binds the FNR-responsive promoter, the recombinase is expressed, the gene or gene cassette is reverted to the 5′ to 3′ orientation, and functional metabolic or satiety effector and/or immune modulator molecule is produced.

[0862] In some embodiments, the invention provides genetically engineered bacteria comprising a gene or gene cassette for producing a metabolic or satiety effector and/or immune modulator molecule and a polymerase- and recombinase-regulated genetic regulatory circuit. For example, the genetically engineered bacteria comprise a first gene encoding a recombinase, wherein the first gene is operably linked to a FNR-responsive promoter; a second gene or gene cassette for producing a metabolic or satiety effector and/or immune modulator molecule operably linked to a T7 promoter; a third gene encoding a T7 polymerase, wherein the T7 polymerase is capable of binding to the T7 promoter and inducing expression of the metabolic or satiety effector and/or immune modulator molecule. The third gene encoding the T7 polymerase is inverted in orientation (3′ to 5′) and flanked by recombinase binding sites, and the recombinase is capable of binding to the recombinase binding sites to induce expression of the T7 polymerase gene by reverting its orientation (5′ to 3′). In the presence of oxygen, FNR does not bind the FNR-responsive promoter, the recombinase is not expressed, the T7 polymerase gene remains in the 3′ to 5′ orientation, and the metabolic or satiety effector and/or immune modulator molecule is not expressed. In the absence of oxygen, FNR dimerizes and binds the FNR-responsive promoter, the recombinase is expressed, the T7 polymerase gene is reverted to the 5′ to 3′ orientation, and the metabolic or satiety effector and/or immune modulator molecule is expressed.

[0863] Host-Plasmid Mutual Dependency

[0864] In some embodiments, the genetically engineered bacteria of the invention also comprise a plasmid that has been modified to create a host-plasmid mutual dependency. In certain embodiments, the mutually dependent host-plasmid platform is GeneGuard (Wright et al., 2015). In some embodiments, the GeneGuard plasmid comprises (i) a conditional origin of replication, in which the requisite replication initiator protein is provided in trans; (ii) an auxotrophic modification that is rescued by the host via genomic translocation and is also compatible for use in rich media; and/or (iii) a nucleic acid sequence which encodes a broad-spectrum toxin. The toxin gene may be used to select against plasmid spread by making the plasmid DNA itself disadvantageous for strains not expressing the anti-toxin (e.g., a wild-type bacterium). In some embodiments, the GeneGuard plasmid is stable for at least 100 generations without antibiotic selection. In some embodiments, the GeneGuard plasmid does not disrupt growth of the host. The GeneGuard plasmid is used to greatly reduce unintentional plasmid propagation in the genetically engineered bacteria of the invention.

[0865] The mutually dependent host-plasmid platform may be used alone or in combination with other biosafety mechanisms, such as those described herein (e.g., kill switches, auxotrophies). In some embodiments, the genetically engineered bacteria comprise a GeneGuard plasmid. In other embodiments, the genetically engineered bacteria comprise a GeneGuard plasmid and/or one or more kill switches. In other embodiments, the genetically engineered bacteria comprise a GeneGuard plasmid and/or one or more auxotrophies. In still other embodiments, the genetically engineered bacteria comprise a GeneGuard plasmid, one or more kill switches, and/or one or more auxotrophies.

[0866] Synthetic gene circuits express on plasmids may function well in the short term but lose ability and/or function in the long term (Danino et al., 2015). In some embodiments, the genetically engineered bacteria comprise stable circuits for expressing genes of interest over prolonged periods. In some embodiments, the genetically engineered bacteria are capable of producing a metabolic or satiety effector and/or immune modulator molecule and further comprise a toxin-antitoxin system that simultaneously produces a toxin (hok) and a short-lived antitoxin (sok), wherein loss of the plasmid causes the cell to be killed by the long-lived toxin (Danino et al., 2015). In some embodiments, the genetically engineered bacteria further comprise alp? from B. subtilis plasmid pL20 and produces filaments that are capable of pushing plasmids to the poles of the cells in order to ensure equal segregation during cell division (Danino et al., 2015).

[0867] Kill Switch

[0868] In some embodiments, the genetically engineered bacteria of the invention also comprise a kill switch (see, e.g., U.S. Provisional Application Nos. 62/183,935 and 62/263,329, incorporated herein by reference in their entireties). The kill switch is intended to actively kill genetically engineered bacteria in response to external stimuli. As opposed to an auxotrophic mutation where bacteria die because they lack an essential nutrient for survival, the kill switch is triggered by a particular factor in the environment that induces the production of toxic molecules within the microbe that cause cell death.

[0869] Bacteria comprising kill switches have been engineered for in vitro research purposes, e.g., to limit the spread of a biofuel-producing microorganism outside of a laboratory environment. Bacteria engineered for in vivo administration to treat a disease may also be programmed to die at a specific time after the expression and delivery of a heterologous gene or genes, for example, a metabolic or satiety effector and/or immune modulator molecule, or after the subject has experienced the therapeutic effect. For example, in some embodiments, the kill switch is activated to kill the bacteria after a period of time following oxygen level-dependent expression of the metabolic or satiety effector and/or immune modulator molecule, e.g., GLP-1. In some embodiments, the kill switch is activated in a delayed fashion following oxygen level-dependent expression of the metabolic or satiety effector and/or immune modulator molecule. Alternatively, the bacteria may be engineered to die after the bacterium has spread outside of a disease site. Specifically, it may be useful to prevent long-term colonization of subjects by the microorganism, spread of the microorganism outside the area of interest (for example, outside the gut) within the subject, or spread of the microorganism outside of the subject into the environment (for example, spread to the environment through the stool of the subject). Examples of such toxins that can be used in kill-switches include, but are not limited to, bacteriocins, lysins, and other molecules that cause cell death by lysing cell membranes, degrading cellular DNA, or other mechanisms. Such toxins can be used individually or in combination. The switches that control their production can be based on, for example, transcriptional activation (toggle switches; see, e.g., Gardner et al., 2000), translation (riboregulators), or DNA recombination (recombinase-based switches), and can sense environmental stimuli such as anaerobiosis or reactive oxygen species. These switches can be activated by a single environmental factor or may require several activators in AND, OR, NAND and NOR logic configurations to induce cell death. For example, an AND riboregulator switch is activated by tetracycline, isopropyl P-D-1-thiogalactopyranoside (IPTG), and arabinose to induce the expression of lysins, which permeabilize the cell membrane and kill the cell. IPTG induces the expression of the endolysin and holin mRNAs, which are then derepressed by the addition of arabinose and tetracycline. All three inducers must be present to cause cell death. Examples of kill switches are known in the art (Callura et al., 2010).

[0870] Kill-switches can be designed such that a toxin is produced in response to an environmental condition or external signal (e.g., the bacteria is killed in response to an external cue) or, alternatively designed such that a toxin is produced once an environmental condition no longer exists or an external signal is ceased.

[0871] Thus, in some embodiments, the genetically engineered bacteria of the disclosure are further programmed to die after sensing an exogenous environmental signal, for example, in a low-oxygen environment. In some embodiments, the genetically engineered bacteria of the present disclosure comprise one or more genes encoding one or more recombinase(s), whose expression is induced in response to an environmental condition or signal and causes one or more recombination events that ultimately leads to the expression of a toxin which kills the cell. In some embodiments, the at least one recombination event is the flipping of an inverted heterologous gene encoding a bacterial toxin which is then constitutively expressed after it is flipped by the first recombinase. In one embodiment, constitutive expression of the bacterial toxin kills the genetically engineered bacterium. In these types of kill-switch systems once the engineered bacterial cell senses the exogenous environmental condition and expresses the heterologous gene of interest, the recombinant bacterial cell is no longer viable.

[0872] In another embodiment in which the genetically engineered bacteria of the present disclosure express one or more recombinase(s) in response to an environmental condition or signal causing at least one recombination event, the genetically engineered bacterium further expresses a heterologous gene encoding an anti-toxin in response to an exogenous environmental condition or signal. In one embodiment, the at least one recombination event is flipping of an inverted heterologous gene encoding a bacterial toxin by a first recombinase. In one embodiment, the inverted heterologous gene encoding the bacterial toxin is located between a first forward recombinase recognition sequence and a first reverse recombinase recognition sequence. In one embodiment, the heterologous gene encoding the bacterial toxin is constitutively expressed after it is flipped by the first recombinase. In one embodiment, the anti-toxin inhibits the activity of the toxin, thereby delaying death of the genetically engineered bacterium. In one embodiment, the genetically engineered bacterium is killed by the bacterial toxin when the heterologous gene encoding the anti-toxin is no longer expressed when the exogenous environmental condition is no longer present.

[0873] In another embodiment, the at least one recombination event is flipping of an inverted heterologous gene encoding a second recombinase by a first recombinase, followed by the flipping of an inverted heterologous gene encoding a bacterial toxin by the second recombinase. In one embodiment, the inverted heterologous gene encoding the second recombinase is located between a first forward recombinase recognition sequence and a first reverse recombinase recognition sequence. In one embodiment, the inverted heterologous gene encoding the bacterial toxin is located between a second forward recombinase recognition sequence and a second reverse recombinase recognition sequence. In one embodiment, the heterologous gene encoding the second recombinase is constitutively expressed after it is flipped by the first recombinase. In one embodiment, the heterologous gene encoding the bacterial toxin is constitutively expressed after it is flipped by the second recombinase. In one embodiment, the genetically engineered bacterium is killed by the bacterial toxin. In one embodiment, the genetically engineered bacterium further expresses a heterologous gene encoding an anti-toxin in response to the exogenous environmental condition. In one embodiment, the anti-toxin inhibits the activity of the toxin when the exogenous environmental condition is present, thereby delaying death of the genetically engineered bacterium. In one embodiment, the genetically engineered bacterium is killed by the bacterial toxin when the heterologous gene encoding the anti-toxin is no longer expressed when the exogenous environmental condition is no longer present.

[0874] In one embodiment, the at least one recombination event is flipping of an inverted heterologous gene encoding a second recombinase by a first recombinase, followed by flipping of an inverted heterologous gene encoding a third recombinase by the second recombinase, followed by flipping of an inverted heterologous gene encoding a bacterial toxin by the third recombinase.

[0875] In one embodiment, the at least one recombination event is flipping of an inverted heterologous gene encoding a first excision enzyme by a first recombinase. In one embodiment, the inverted heterologous gene encoding the first excision enzyme is located between a first forward recombinase recognition sequence and a first reverse recombinase recognition sequence. In one embodiment, the heterologous gene encoding the first excision enzyme is constitutively expressed after it is flipped by the first recombinase. In one embodiment, the first excision enzyme excises a first essential gene. In one embodiment, the programmed recombinant bacterial cell is not viable after the first essential gene is excised.

[0876] In one embodiment, the first recombinase further flips an inverted heterologous gene encoding a second excision enzyme. In one embodiment, the inverted heterologous gene encoding the second excision enzyme is located between a second forward recombinase recognition sequence and a second reverse recombinase recognition sequence. In one embodiment, the heterologous gene encoding the second excision enzyme is constitutively expressed after it is flipped by the first recombinase. In one embodiment, the genetically engineered bacterium dies or is no longer viable when the first essential gene and the second essential gene are both excised. In one embodiment, the genetically engineered bacterium dies or is no longer viable when either the first essential gene is excised or the second essential gene is excised by the first recombinase.

[0877] In one embodiment, the genetically engineered bacterium dies after the at least one recombination event occurs. In another embodiment, the genetically engineered bacterium is no longer viable after the at least one recombination event occurs.

[0878] In any of these embodiment, the recombinase can be a recombinase selected from the group consisting of: Bxb1, PhiC31, TP901, Bxb1, PhiC31, TP901, HK022, HP1, R4, Intl, Int2, Int3, Int4, Int5, Int6, Intl, Int8, Int9, Int 10, Int 11, Int12, Int13, Int14, Int15, Int16, Int17, Int 18, Int19, Int20, Int21, Int22, Int23, Int24, Int25, Int26, Int27, Int28, Int29, Int30, Int31, Int32, Int33, and Int34, or a biologically active fragment thereof.

[0879] In the above-described kill-switch circuits, a toxin is produced in the presence of an environmental factor or signal. In another aspect of kill-switch circuitry, a toxin may be repressed in the presence of an environmental factor (not produced) and then produced once the environmental condition or external signal is no longer present. Such kill switches are called repression-based kill switches and represent systems in which the bacterial cells are viable only in the presence of an external factor or signal, such as arabinose or other sugar. Exemplary kill switch designs in which the toxin is repressed in the presence of an external factor or signal (and activated once the external signal is removed) is shown in FIG. 69-FIG. 72. The disclosure provides recombinant bacterial cells which express one or more heterologous gene(s) upon sensing arabinose or other sugar in the exogenous environment. In this aspect, the recombinant bacterial cells contain the araC gene, which encodes the AraC transcription factor, as well as one or more genes under the control of the araBAD promoter. In the absence of arabinose, the AraC transcription factor adopts a conformation that represses transcription of genes under the control of the araBAD promoter. In the presence of arabinose, the AraC transcription factor undergoes a conformational change that allows it to bind to and activate the AraBAD promoter, which induces expression of the desired gene, for example tetR, which represses expression of a toxin gene. In this embodiment, the toxing gene is repressed in the presence of arabinose or other sugar. In an environment where arabinose is not present, the tetR gene is not activated and the toxin is expressed, thereby killing the bacteria. The arbinoase system can also be used to express an essential gene, in which the essential gene is only expressed in the presence of arabinose or other sugar and is not expressed when arabinose or other sugar is absent from the environment.

[0880] Thus, in some embodiments in which one or more heterologous gene(s) are expressed upon sensing arabinose in the exogenous environment, the one or more heterologous genes are directly or indirectly under the control of the araBAD promoter. In some embodiments, the expressed heterologous gene is selected from one or more of the following: a heterologous therapeutic gene, a heterologous gene encoding an antitoxin, a heterologous gene encoding a repressor protein or polypeptide, for example, a TetR repressor, a heterologous gene encoding an essential protein not found in the bacterial cell, and/or a heterologous encoding a regulatory protein or polypeptide.

[0881] Arabinose inducible promoters are known in the art, including Pₐᵣₐ, P_{araB}, P_{araC}, and P_{araBAD}. In one embodiment, the arabinose inducible promoter is from E. coli. In some embodiments, the P_{araC} promoter and the P_{araBAD} promoter operate as a bidirectional promoter, with the P_{araBAD} promoter controlling expression of a heterologous gene(s) in one direction, and the P_{araC} (in close proximity to, and on the opposite strand from the P_{araBAD} promoter), controlling expression of a heterologous gene(s) in the other direction. In the presence of arabinose, transcription of both heterologous genes from both promoters is induced. However, in the absence of arabinose, transcription of both heterologous genes from both promoters is not induced.

[0882] In one exemplary embodiment of the disclosure, the genetically engineered bacteria of the present disclosure contains a kill-switch having at least the following sequences: a P_{araBAD} promoter operably linked to a heterologous gene encoding a Tetracycline Repressor Protein (TetR), a P_{araC} promoter operably linked to a heterologous gene encoding AraC transcription factor, and a heterologous gene encoding a bacterial toxin operably linked to a promoter which is repressed by the Tetracycline Repressor Protein (P_{TetR}). In the presence of arabinose, the AraC transcription factor activates the P_{araBAD} promoter, which activates transcription of the TetR protein which, in turn, represses transcription of the toxin. In the absence of arabinose, however, AraC suppresses transcription from the P_{araBAD} promoter and no TetR protein is expressed. In this case, expression of the heterologous toxin gene is activated, and the toxin is expressed. The toxin builds up in the recombinant bacterial cell, and the recombinant bacterial cell is killed. In one embodiment, the AraC gene encoding the AraC transcription factor is under the control of a constitutive promoter and is therefore constitutively expressed.

[0883] In one embodiment of the disclosure, the genetically engineered bacterium further comprises an antitoxin under the control of a constitutive promoter. In this situation, in the presence of arabinose, the toxin is not expressed due to repression by TetR protein, and the antitoxin protein builds-up in the cell. However, in the absence of arabinose, TetR protein is not expressed, and expression of the toxin is induced. The toxin begins to build-up within the recombinant bacterial cell. The recombinant bacterial cell is no longer viable once the toxin protein is present at either equal or greater amounts than that of the anti-toxin protein in the cell, and the recombinant bacterial cell will be killed by the toxin.

[0884] In another embodiment of the disclosure, the genetically engineered bacterium further comprises an antitoxin under the control of the P_{araBAD} promoter. In this situation, in the presence of arabinose, TetR and the anti-toxin are expressed, the anti-toxin builds up in the cell, and the toxin is not expressed due to repression by TetR protein. However, in the absence of arabinose, both the TetR protein and the anti-toxin are not expressed, and expression of the toxin is induced. The toxin begins to build-up within the recombinant bacterial cell. The recombinant bacterial cell is no longer viable once the toxin protein is expressed, and the recombinant bacterial cell will be killed by the toxin.

[0885] In another exemplary embodiment of the disclosure, the genetically engineered bacteria of the present disclosure contains a kill-switch having at least the following sequences: a _{ParaBAD} promoter operably linked to a heterologous gene encoding an essential polypeptide not found in the recombinant bacterial cell (and required for survival), and a P_{arac} promoter operably linked to a heterologous gene encoding AraC transcription factor. In the presence of arabinose, the AraC transcription factor activates the P_{araBAD} promoter, which activates transcription of the heterologous gene encoding the essential polypeptide, allowing the recombinant bacterial cell to survive. In the absence of arabinose, however, AraC suppresses transcription from the P_{araBAD} promoter and the essential protein required for survival is not expressed. In this case, the recombinant bacterial cell dies in the absence of arabinose. In some embodiments, the sequence of P_{araBAD} promoter operably linked to a heterologous gene encoding an essential polypeptide not found in the recombinant bacterial cell can be present in the bacterial cell in conjunction with the TetR/toxin kill-switch system described directly above. In some embodiments, the sequence of P_{araBAD} promoter operably linked to a heterologous gene encoding an essential polypeptide not found in the recombinant bacterial cell can be present in the bacterial cell in conjunction with the TetR/toxin/anto-toxin kill-switch system described directly above.

[0886] In yet other embodiments, the bacteria may comprise a plasmid stability system with a plasmid that produces both a short-lived anti-toxin and a long-lived toxin. In this system, the bacterial cell produces equal amounts of toxin and anti-toxin to neutralize the toxin. However, if/when the cell loses the plasmid, the short-lived anti-toxin begins to decay. When the anti-toxin decays completely the cell dies as a result of the longer-lived toxin killing it.

[0887] In some embodiments, the engineered bacteria of the present disclosure further comprise the gene(s) encoding the components of any of the above-described kill-switch circuits.

[0888] In any of the above-described embodiments, the bacterial toxin is selected from the group consisting of a lysin, Hok, Fst, TisB, LdrD, Kid, SymE, MazF, FlmA, Ibs, XCV2162, dinJ, CcdB, MazF, ParE, YafO, Zeta, hicB, relB, yhaV, yoeB, chpBK, hipA, microcin B, microcin B17, microcin C, microcin C7-051, microcin J25, microcin ColV, microcin 24, microcin L, microcin D93, microcin L, microcin E492, microcin H47, microcin 147, microcin M, colicin A, colicin El, colicin K, colicin N, colicin U, colicin B, colicin la, colicin Ib, colicin 5, colicin10, colicin S4, colicin Y, colicin E2, colicin E7, colicin E8, colicin E9, colicin E3, colicin E4, colicin E6, colicin E5, colicin D, colicin M, and cloacin DF13, or a biologically active fragment thereof.

[0889] In any of the above-described embodiments, the anti-toxin is selected from the group consisting of an anti-lysin, Sok, RNAII, IstR, RdID, Kis, SymR, MazE, FlmB, Sib, ptaRNA1, yafQ, CcdA, MazE, ParD, yafN, Epsilon, HicA, relE, prlF, yefM, chpBl, hipB, MccE, MccE^{cTD}, MccF, Cai, ImmEl, Cki, Cni, Cui, Cbi, Iia, Imm, Cfi, Im10, Csi, Cyi, Im2, Im7, Im8, Im9, Im3, Im4, ImmE6, cloacin immunity protein (Cim), ImmE5, ImmD, and Cmi, or a biologically active fragment thereof.

[0890] In one embodiment, the bacterial toxin is bactericidal to the genetically engineered bacterium. In one embodiment, the bacterial toxin is bacteriostatic to the genetically engineered bacterium.

[0891] In some embodiments, the genetically engineered bacterium provided herein is an auxotroph. In one embodiment, the genetically engineered bacterium is an auxotroph selected from a cysE, glnA, ilvD, leuB, lysA, serA, metA, glyA, hisB, ilvA, pheA, proA, thrC, trpC, tyrA, thyA, uraA, dapA, dapB, dapD, dapE, dapF, flhD, metB, metC, proAB, and thil auxotroph. In some embodiments, the engineered bacteria have more than one auxotrophy, for example, they may be a ΔthyA and ΔdapA auxotroph.

[0892] In some embodiments, the genetically engineered bacterium provided herein further comprises a kill-switch circuit, such as any of the kill-switch circuits provided herein. For example, in some embodiments, the genetically engineered bacteria further comprise one or more genes encoding one or more recombinase(s) under the control of an inducible promoter and an inverted toxin sequence. In some embodiments, the genetically engineered bacteria further comprise one or more genes encoding an antitoxin. In some embodiments, the engineered bacteria further comprise one or more genes encoding one or more recombinase(s) under the control of an inducible promoter and one or more inverted excision genes, wherein the excision gene(s) encode an enzyme that deletes an essential gene. In some embodiments, the genetically engineered bacteria further comprise one or more genes encoding an antitoxin. In some embodiments, the engineered bacteria further comprise one or more genes encoding a toxin under the control of a promoter having a TetR repressor binding site and a gene encoding the TetR under the control of an inducible promoter that is induced by arabinose, such as ParaBAD. In some embodiments, the genetically engineered bacteria further comprise one or more genes encoding an antitoxin.

[0893] In some embodiments, the genetically engineered bacterium is an auxotroph comprising a therapeutic payload and further comprises a kill-switch circuit, such as any of the kill-switch circuits described herein.

[0894] In some embodiments of the above described genetically engineered bacteria, the gene or gene cassette for producing the metabolic or satiety effector and/or immune modulator molecule is present on a plasmid in the bacterium and operatively linked on the plasmid to the promoter that is induced under low-oxygen or anaerobic conditions. In other embodiments, the gene or gene cassette for producing the metabolic or satiety effector and/or immune modulator molecule is present in the bacterial chromosome and is operatively linked in the chromosome to the promoter that is induced under low-oxygen or anaerobic conditions.

[0895] Pharmaceutical Compositions and Formulations

[0896] Pharmaceutical compositions comprising the genetically engineered bacteria of the invention may be used to treat, manage, ameliorate, and/or prevent a metabolic disease, e.g., obesity, type 2 diabetes. Pharmaceutical compositions of the invention comprising one or more genetically engineered bacteria, alone or in combination with prophylactic agents, therapeutic agents, and/or and pharmaceutically acceptable carriers are provided.

[0897] In certain embodiments, the pharmaceutical composition comprises one species, strain, or subtype of bacteria described herein that are engineered to treat, manage, ameliorate, and/or prevent a metabolic disease. In alternate embodiments, the pharmaceutical composition comprises two or more species, strains, and/or subtypes of bacteria described herein that are each engineered to treat, manage, ameliorate, and/or prevent a metabolic disease.

[0898] The pharmaceutical compositions of the invention may be formulated in a conventional manner using one or more physiologically acceptable carriers comprising excipients and auxiliaries, which facilitate processing of the active ingredients into compositions for pharmaceutical use. Methods of formulating pharmaceutical compositions are known in the art (see, e.g., “Remington's Pharmaceutical Sciences,” Mack Publishing Co., Easton, Pa.). In some embodiments, the pharmaceutical compositions are subjected to tabletting, lyophilizing, direct compression, conventional mixing, dissolving, granulating, levigating, emulsifying, encapsulating, entrapping, or spray drying to form tablets, granulates, nanoparticles, nanocapsules, microcapsules, microtablets, pellets, or powders, which may be enterically coated or uncoated. Appropriate formulation depends on the route of administration.

[0899] The genetically engineered bacteria of the invention may be formulated into pharmaceutical compositions in any suitable dosage form (e.g., liquids, capsules, sachet, hard capsules, soft capsules, tablets, enteric coated tablets, suspension powders, granules, or matrix sustained release formations for oral administration) and for any suitable type of administration (e.g., oral, topical, immediate-release, pulsatile-release, delayed-release, or sustained release). Suitable dosage amounts for the genetically engineered bacteria may range from about 10⁵ to 10¹² bacteria, e.g., approximately 10⁵ bacteria, approximately 10⁶ bacteria, approximately 10⁷ bacteria, approximately 10⁸ bacteria, approximately 10⁹ bacteria, approximately 10¹⁰ bacteria, approximately 10¹¹ bacteria, or approximately 10¹¹ bacteria. The composition may be administered once or more daily, weekly, or monthly. The genetically engineered bacteria may be formulated into pharmaceutical compositions comprising one or more pharmaceutically acceptable carriers, thickeners, diluents, buffers, surface active agents, neutral or cationic lipids, lipid complexes, liposomes, penetration enhancers, carrier compounds, and other pharmaceutically acceptable carriers or agents.

[0900] The genetically engineered bacteria of the invention may be administered topically and formulated in the form of an ointment, cream, transdermal patch, lotion, gel, shampoo, spray, aerosol, solution, emulsion, or other form well-known to one of skill in the art. See, e.g., “Remington's Pharmaceutical Sciences,” Mack Publishing Co., Easton, Pa. In an embodiment, for non-sprayable topical dosage forms, viscous to semi-solid or solid forms comprising a carrier or one or more excipients compatible with topical application and having a dynamic viscosity greater than water are employed. Suitable formulations include, but are not limited to, solutions, suspensions, emulsions, creams, ointments, powders, liniments, salves, etc., which may be sterilized or mixed with auxiliary agents (e.g., preservatives, stabilizers, wetting agents, buffers, or salts) for influencing various properties, e.g., osmotic pressure. Other suitable topical dosage forms include sprayable aerosol preparations wherein the active ingredient in combination with a solid or liquid inert carrier, is packaged in a mixture with a pressurized volatile (e.g., a gaseous propellant, such as freon) or in a squeeze bottle. Moisturizers or humectants can also be added to pharmaceutical compositions and dosage forms. Examples of such additional ingredients are well known in the art.

[0901] The genetically engineered bacteria of the invention may be administered orally and formulated as tablets, pills, dragees, capsules, liquids, gels, syrups, slurries, suspensions, etc. Pharmacological compositions for oral use can be made using a solid excipient, optionally grinding the resulting mixture, and processing the mixture of granules, after adding suitable auxiliaries if desired, to obtain tablets or dragee cores. Suitable excipients include, but are not limited to, fillers such as sugars, including lactose, sucrose, mannitol, or sorbitol; cellulose compositions such as maize starch, wheat starch, rice starch, potato starch, gelatin, gum tragacanth, methyl cellulose, hydroxypropylmethyl-cellulose, sodium carbomethylcellulose; and/or physiologically acceptable polymers such as polyvinylpyrrolidone (PVP) or polyethylene glycol (PEG). Disintegrating agents may also be added, such as cross-linked polyvinylpyrrolidone, agar, alginic acid or a salt thereof such as sodium alginate.

[0902] Tablets or capsules can be prepared by conventional means with pharmaceutically acceptable excipients such as binding agents (e.g., pregelatinised maize starch, polyvinylpyrrolidone, hydroxypropyl methylcellulo se, carboxymethylcellulose, polyethylene glycol, sucrose, glucose, sorbitol, starch, gum, kaolin, and tragacanth); fillers (e.g., lactose, microcrystalline cellulose, or calcium hydrogen phosphate); lubricants (e.g., calcium, aluminum, zinc, stearic acid, polyethylene glycol, sodium lauryl sulfate, starch, sodium benzoate, L-leucine, magnesium stearate, talc, or silica); disintegrants (e.g., starch, potato starch, sodium starch glycolate, sugars, cellulose derivatives, silica powders); or wetting agents (e.g., sodium lauryl sulphate). The tablets may be coated by methods well known in the art. A coating shell may be present, and common membranes include, but are not limited to, polylactide, polyglycolic acid, polyanhydride, other biodegradable polymers, alginate-polylysine-alginate (APA), alginate-polymethylene-co-guanidine-alginate (A-PMCG-A), hydroymethylacrylate-methyl methacrylate (HEMA-MMA), multilayered HEMA-MMA-MAA, polyacrylonitrilevinylchloride (PAN-PVC), acrylonitrile/sodium methallylsulfonate (AN-69), polyethylene glycol/poly pentamethylcyclopentasiloxane/polydimethylsiloxane (PEG/PD5/PDMS), poly N,N-dimethyl acrylamide (PDMAAm), siliceous encapsulates, cellulose sulphate/sodium alginate/polymethylene-co-guanidine (CS/A/PMCG), cellulose acetate phthalate, calcium alginate, k-carrageenan-locust bean gum gel beads, gellan-xanthan beads, poly(lactide-co-glycolides), carrageenan, starch poly-anhydrides, starch polymethacrylates, polyamino acids, and enteric coating polymers.

[0903] In some embodiments, the genetically engineered bacteria are enterically coated for release into the gut or a particular region of the gut, for example, the small or large intestines. The typical pH profile from the stomach to the colon is about 1-4 (stomach), 5.5-6 (duodenum), 7.3-8.0 (ileum), and 5.5-6.5 (colon). In some diseases, the pH profile may be modified. In some embodiments, the coating is degraded in specific pH environments in order to specify the site of release. In some embodiments, at least two coatings are used. In some embodiments, the outside coating and the inside coating are degraded at different pH levels.

[0904] In some embodiments, enteric coating materials may be used, in one or more coating layers (e.g., outer, inner and/o intermediate coating layers). Enteric coated polymers remain unionised at low pH, and therefore remain insoluble. But as the pH increases in the gastrointestinal tract, the acidic functional groups are capable of ionisation, and the polymer swells or becomes soluble in the intestinal fluid.

[0905] Materials used for enteric coatings include Cellulose acetate phthalate (CAP), Poly(methacrylic acid-co-methyl methacrylate), Cellulose acetate trimellitate (CAT), Poly(vinyl acetate phthalate) (PVAP) and Hydroxypropyl methylcellulose phthalate (HPMCP), fatty acids, waxes, Shellac (esters of aleurtic acid), plastics and plant fibers. Additionally, Zein, Aqua-Zein (an aqueous zein formulation containing no alcohol), amylose starch and starch derivatives, and dextrins (e.g., maltodextrin) are also used. Other known enteric coatings include ethylcellulose, methylcellulose, hydroxypropyl methylcellulose, amylo se acetate phthalate, cellulose acetate phthalate, hydroxyl propyl methyl cellulose phthalate, an ethylacrylate, and a methylmethacrylate.

[0906] Coating polymers also may comprise one or more of, phthalate derivatives, CAT, HPMCAS, polyacrylic acid derivatives, copolymers comprising acrylic acid and at least one acrylic acid ester, EudragitTM S (poly(methacrylic acid, methyl methacrylate)1:2); Eudragit L100TM S (poly(methacrylic acid, methyl methacrylate)1:1); Eudragit L3ODTM, (poly(methacrylic acid, ethyl acrylate)1:1); and (Eudragit L100-55) (poly(methacrylic acid, ethyl acrylate)1:1) (Eudragit™ L is an anionic polymer synthesized from methacrylic acid and methacrylic acid methyl ester), polymethyl methacrylate blended with acrylic acid and acrylic ester copolymers, alginic acid, ammonia alginate, sodium, potassium, magnesium or calcium alginate, vinyl acetate copolymers, polyvinyl acetate 30D (30% dispersion in water), a neutral methacrylic ester comprising poly(dimethylaminoethylacrylate) (“Eudragit E™), a copolymer of methylmethacrylate and ethylacrylate with trimethylammonioethyl methacrylate chloride, a copolymer of methylmethacrylate and ethylacrylate, Zein, shellac, gums, or polysaccharides, or a combination thereof.

[0907] Coating layers may also include polymers which contain Hydroxypropylmethylcellulo se (HPMC), Hydroxypropylethylcellulose (HPEC), Hydroxypropylcellulo se (HPC), hydroxypropylethylcellulose (HPEC), hydroxymethylpropylcellulose (HMPC), ethylhydroxyethylcellulose (EHEC) (Ethulose), hydroxyethylmethylcellulose (HEMC), hydroxymethylethylcellulose (HMEC), propylhydroxyethylcellulose (PHEC), methylhydroxyethylcellulose (M H EC), hydrophobically modified hydroxyethylcellulose (NEXTON), carboxymethyl hydroxyethylcellulose (CMHEC), Methylcellulose, Ethylcellulose, water soluble vinyl acetate copolymers, gums, polysaccharides such as alginic acid and alginates such as ammonia alginate, sodium alginate, potassium alginate, acid phthalate of carbohydrates, amylose acetate phthalate, cellulose acetate phthalate (CAP), cellulose ester phthalates, cellulose ether phthalates, hydroxypropylcellulose phthalate (HPCP), hydroxypropylethylcellulo se phthalate (HPECP), hydroxyproplymethylcellulose phthalate (HPMCP), hydroxyproplymethylcellulose acetate succinate (HPMCAS).

[0908] Liquid preparations for oral administration may take the form of solutions, syrups, suspensions, or a dry product for constitution with water or other suitable vehicle before use. Such liquid preparations may be prepared by conventional means with pharmaceutically acceptable agents such as suspending agents (e.g., sorbitol syrup, cellulose derivatives, or hydrogenated edible fats); emulsifying agents (e.g., lecithin or acacia); non-aqueous vehicles (e.g., almond oil, oily esters, ethyl alcohol, or fractionated vegetable oils); and preservatives (e.g., methyl or propyl-p-hydroxybenzoates or sorbic acid). The preparations may also contain buffer salts, flavoring, coloring, and sweetening agents as appropriate. Preparations for oral administration may be suitably formulated for slow release, controlled release, or sustained release of the genetically engineered bacteria of the invention.

[0909] In one embodiment, the genetically engineered microorganisms of the disclosure may be formulated in a composition suitable for administration to pediatric subjects. As is well known in the art, children differ from adults in many aspects, including different rates of gastric emptying, pH, gastrointestinal permeability, etc. (Ivanovska et al., Pediatrics, 134(2):361-372, 2014). Moreover, pediatric formulation acceptability and preferences, such as route of administration and taste attributes, are critical for achieving acceptable pediatric compliance. Thus, in one embodiment, the composition suitable for administration to pediatric subjects may include easy-to-swallow or dissolvable dosage forms, or more palatable compositions, such as compositions with added flavors, sweeteners, or taste blockers. In one embodiment, a composition suitable for administration to pediatric subjects may also be suitable for administration to adults.

[0910] In one embodiment, the composition suitable for administration to pediatric subjects may include a solution, syrup, suspension, elixir, powder for reconstitution as suspension or solution, dispersible/effervescent tablet, chewable tablet, gummy candy, lollipop, freezer pop, troche, chewing gum, oral thin strip, orally disintegrating tablet, sachet, soft gelatin capsule, sprinkle oral powder, or granules. In one embodiment, the composition is a gummy candy, which is made from a gelatin base, giving the candy elasticity, desired chewy consistency, and longer shelf-life. In some embodiments, the gummy candy may also comprise sweeteners or flavors.

[0911] In one embodiment, the composition suitable for administration to pediatric subjects may include a flavor. As used herein, “flavor” is a substance (liquid or solid) that provides a distinct taste and aroma to the formulation. Flavors also help to improve the palatability of the formulation. Flavors include, but are not limited to, strawberry, vanilla, lemon, grape, bubble gum, and cherry.

[0912] In certain embodiments, the genetically engineered bacteria of the invention may be orally administered, for example, with an inert diluent or an assimilable edible carrier. The compound may also be enclosed in a hard or soft shell gelatin capsule, compressed into tablets, or incorporated directly into the subject's diet. For oral therapeutic administration, the compounds may be incorporated with excipients and used in the form of ingestible tablets, buccal tablets, troches, capsules, elixirs, suspensions, syrups, wafers, and the like. To administer a compound of the invention by other than parenteral administration, it may be necessary to coat the compound with, or co-administer the compound with, a material to prevent its inactivation.

[0913] In some embodiments, the composition is formulated for intraintestinal administration, intrajejunal administration, intraduodenal administration, intraileal administration, gastric shunt administration, or intracolic administration, via nanoparticles, nanocapsules, microcapsules, or microtablets, which are enterically coated or uncoated. The pharmaceutical compositions of the present invention may also be formulated in rectal compositions such as suppositories or retention enemas, using, e.g., conventional suppository bases such as cocoa butter or other glycerides. The compositions may be suspensions, solutions, or emulsions in oily or aqueous vehicles, and may contain suspending, stabilizing and/or dispersing agents.

[0914] The genetically engineered bacteria of the invention may be administered intranasally, formulated in an aerosol form, spray, mist, or in the form of drops, and conveniently delivered in the form of an aerosol spray presentation from pressurized packs or a nebuliser, with the use of a suitable propellant (e.g., dichlorodifluoromethane, trichlorofluoromethane, dichlorotetrafluoroethane, carbon dioxide or other suitable gas). Pressurized aerosol dosage units may be determined by providing a valve to deliver a metered amount. Capsules and cartridges (e.g., of gelatin) for use in an inhaler or insufflator may be formulated containing a powder mix of the compound and a suitable powder base such as lactose or starch.

[0915] The genetically engineered bacteria of the invention may be administered and formulated as depot preparations. Such long acting formulations may be administered by implantation or by injection. For example, the compositions may be formulated with suitable polymeric or hydrophobic materials (e.g., as an emulsion in an acceptable oil) or ion exchange resins, or as sparingly soluble derivatives (e.g., as a sparingly soluble salt).

[0916] In some embodiments, the invention provides pharmaceutically acceptable compositions in single dosage forms. Single dosage forms may be in a liquid or a solid form. Single dosage forms may be administered directly to a patient without modification or may be diluted or reconstituted prior to administration. In certain embodiments, a single dosage form may be administered in bolus form, e.g., single injection, single oral dose, including an oral dose that comprises multiple tablets, capsule, pills, etc. In alternate embodiments, a single dosage form may be administered over a period of time, e.g., by infusion.

[0917] Single dosage forms of the pharmaceutical composition of the invention may be prepared by portioning the pharmaceutical composition into smaller aliquots, single dose containers, single dose liquid forms, or single dose solid forms, such as tablets, granulates, nanoparticles, nanocapsules, microcapsules, microtablets, pellets, or powders, which may be enterically coated or uncoated. A single dose in a solid form may be reconstituted by adding liquid, typically sterile water or saline solution, prior to administration to a patient.

[0918] Dosage regimens may be adjusted to provide a therapeutic response. For example, a single bolus may be administered at one time, several divided doses may be administered over a predetermined period of time, or the dose may be reduced or increased as indicated by the therapeutic situation. The specification for the dosage is dictated by the unique characteristics of the active compound and the particular therapeutic effect to be achieved. Dosage values may vary with the type and severity of the condition to be alleviated. For any particular subject, specific dosage regimens may be adjusted over time according to the individual need and the professional judgment of the treating clinician.

[0919] In another embodiment, the composition can be delivered in a controlled release or sustained release system. In one embodiment, a pump may be used to achieve controlled or sustained release. In another embodiment, polymeric materials can be used to achieve controlled or sustained release of the therapies of the present disclosure (see e.g., U.S. Pat. No. 5,989,463). Examples of polymers used in sustained release formulations include, but are not limited to, poly(2-hydroxy ethyl methacrylate), poly(methyl methacrylate), poly(acrylic acid), poly(ethylene-co-vinyl acetate), poly(methacrylic acid), polyglycolides (PLG), polyanhydrides, poly(N- vinyl pyrrolidone), poly(vinyl alcohol), polyacrylamide, poly(ethylene glycol), polylactides (PLA), poly(lactide-co-glycolides) (PLGA), and polyorthoesters. The polymer used in a sustained release formulation may be inert, free of leachable impurities, stable on storage, sterile, and biodegradable. In some embodiments, a controlled or sustained release system can be placed in proximity of the prophylactic or therapeutic target, thus requiring only a fraction of the systemic dose. Any suitable technique known to one of skill in the art may be used.

[0920] The genetically engineered bacteria of the invention may be administered and formulated as neutral or salt forms. Pharmaceutically acceptable salts include those formed with anions such as those derived from hydrochloric, phosphoric, acetic, oxalic, tartaric acids, etc., and those formed with cations such as those derived from sodium, potassium, ammonium, calcium, ferric hydroxides, isopropylamine, triethylamine, 2-ethylamino ethanol, histidine, procaine, etc.

[0921] The ingredients are supplied either separately or mixed together in unit dosage form, for example, as a dry lyophilized powder or water-free concentrate in a hermetically sealed container such as an ampoule or sachet indicating the quantity of active agent. If the mode of administration is by injection, an ampoule of sterile water for injection or saline can be provided so that the ingredients may be mixed prior to administration.

[0922] The pharmaceutical compositions of the invention may be packaged in a hermetically sealed container such as an ampoule or sachet indicating the quantity of the agent. In one embodiment, one or more of the pharmaceutical compositions of the invention is supplied as a dry sterilized lyophilized powder or water-free concentrate in a hermetically sealed container and can be reconstituted (e.g., with water or saline) to the appropriate concentration for administration to a subject. In an embodiment, one or more of the prophylactic or therapeutic agents or pharmaceutical compositions of the invention is supplied as a dry sterile lyophilized powder in a hermetically sealed container stored between 2° C. and 8° C. and administered within 1 hour, within 3 hours, within 5 hours, within 6 hours, within 12 hours, within 24 hours, within 48 hours, within 72 hours, or within one week after being reconstituted. Cryoprotectants can be included for a lyophilized dosage form, principally 0-10% sucrose (optimally 0.5-1.0%). Other suitable cryoprotectants include trehalose and lactose. Other suitable bulking agents include glycine and arginine, either of which can be included at a concentration of 0-0.05%, and polysorbate-80 (optimally included at a concentration of 0.005-0.01%). Additional surfactants include but are not limited to polysorbate 20 and BRIJ surfactants. The pharmaceutical composition may be prepared as an injectable solution and can further comprise an agent useful as an adjuvant, such as those used to increase absorption or dispersion, e.g., hyaluronidase.

[0923] Dosing can depend on several factors, including severity and responsiveness of the disease, route of administration, time course of treatment (days to months to years), and time to amelioration of the disease. Toxicity and therapeutic efficacy of compounds provided herein can be determined by standard pharmaceutical procedures in cell culture or animal models. For example, LD₅₀, ED₅₀, EC₅₀, and IC₅₀ may be determined, and the dose ratio between toxic and therapeutic effects (LD₅₀/ED₅₀) may be calculated as the therapeutic index. Compositions that exhibit toxic side effects may be used, with careful modifications to minimize potential damage to reduce side effects. Dosing may be estimated initially from cell culture assays and animal models. The data obtained from in vitro and in vivo assays and animal studies can be used in formulating a range of dosage for use in humans.

[0924] Methods of Treatment

[0925] Another aspect of the invention provides methods of treating metabolic disease, e.g., obesity, type 2 diabetes. In some embodiments, the metabolic disease is selected from the group consisting of type 1 diabetes; type 2 diabetes; metabolic syndrome; Bardet-Biedel syndrome; Prader-Willi syndrome; non-alcoholic fatty liver disease; tuberous sclerosis; Albright hereditary osteodystrophy; brain-derived neurotrophic factor (BDNF) deficiency; Single-minded 1 (SIM1) deficiency; leptin deficiency; leptin receptor deficiency; pro-opiomelanocortin (POMC) defects; proprotein convertase subtilisin/kexin type 1 (PCSK1) deficiency; Src homology 2B1 (SH2B1) deficiency; pro-hormone convertase 1/3 deficiency; melanocortin-4-receptor (MC4R) deficiency; Wilms tumor, aniridia, genitourinary anomalies, and mental retardation (WAGR) syndrome; pseudohypoparathyroidism type 1A; Fragile X syndrome; Borjeson-Forsmann-Lehmann syndrome; Alstrom syndrome; Cohen syndrome; and ulnar-mammary syndrome. In some embodiments, the invention provides methods for reducing, ameliorating, or eliminating one or more symptom(s) associated with these diseases, including but not limited to weight gain, obesity, fatigue, hyperlipidemia, hyperphagia, hyperdipsia, polyphagia, polydipsia, polyuria, pain of the extremities, numbness of the extremities, blurry vision, nystagmus, hearing loss, cardiomyopathy, insulin resistance, light sensitivity, pulmonary disease, liver disease, liver cirrhosis, liver failure, kidney disease, kidney failure, seizures, hypogonadism, and infertility. In some embodiments, the subject to be treated is a human patient.

[0926] The method may comprise preparing a pharmaceutical composition with at least one genetically engineered species, strain, or subtype of bacteria described herein, and administering the pharmaceutical composition to a subject in a therapeutically effective amount. In some embodiments, the genetically engineered bacteria of the invention are administered orally, e.g., in a liquid suspension. In some embodiments, the genetically engineered bacteria of the invention are lyophilized in a gel cap and administered orally. In some embodiments, the genetically engineered bacteria of the invention are administered via a feeding tube or gastric shunt. In some embodiments, the genetically engineered bacteria of the invention are administered rectally, e.g., by enema. In some embodiments, the genetically engineered bacteria of the invention are administered topically, intraintestinally, intrajejunally, intraduodenally, intraileally, and/or intracolically.

[0927] In certain embodiments, the pharmaceutical composition described herein is administered to treat, manage, ameliorate, or prevent metabolic disease in a subject. In some embodiments, the method of treating or ameliorating metabolic disease allows one or more symptoms of the disease to improve by at least about 5%, 10%, 20%, 30%, 40%, 50%, 60%, 70%, 80%, 90%, 95%, or more as compared to levels in an untreated or control subject. In some embodiments, the symptom (e.g., obesity, insulin resistance) is measured by comparing measurements in a subject before and after administration of the pharmaceutical composition.

[0928] Before, during, and after the administration of the pharmaceutical composition in a subject, metabolic symptoms and manifestations may be measured in a biological sample, e.g., blood, serum, plasma, urine, fecal matter, peritoneal fluid, a sample collected from a tissue, such as liver, skeletal muscle, pancreas, epididymal fat, subcutaneous fat, and beige fat. The biological samples may be analyzed to measure symptoms and manifestations of metabolic disease. Useful measurements include measures of lean mass, fat mass, body weight, food intake, GLP-1 levels, endotoxin levels, insulin levels, lipid levels, HbA1c levels, short-chain fatty acid levels, triglyceride levels, and nonesterified fatty acid levels. Useful assays include, but are not limited to, insulin tolerance tests, glucose tolerance tests, pyruvate tolerance tests, assays for intestinal permeability, and assays for glycaemia upon multiple fasting and refeeding time points. In some embodiments, the methods may include administration of the compositions of the invention to reduce metabolic symptoms and manifestations to baseline levels, e.g., levels comparable to those of a healthy control, in a subject. In some embodiments, the methods may include administration of the compositions of the invention to reduce metabolic symptoms and manifestations to undetectable levels in a subject, or to less than about 1%, 2%, 5%, 10%, 20%, 25%, 30%, 40%, 50%, 60%, 70%, 75%, or 80% of the subject's levels prior to treatment.

[0929] In certain embodiments, the genetically engineered bacteria are E. coli Nissle. The genetically engineered bacteria may be destroyed, e.g., by defense factors in the gut or blood serum (Sonnenborn et al., 2009) or by activation of a kill switch, several hours or days after administration. Thus, the pharmaceutical composition comprising the genetically engineered bacteria may be re-administered at a therapeutically effective dose and frequency. Length of Nissle residence in vivo in mice is shown in FIG. 84 and FIG. 85. In alternate embodiments, the genetically engineered bacteria are not destroyed within hours or days after administration and may propagate and colonize the gut.

[0930] The pharmaceutical composition may be administered alone or in combination with one or more additional therapeutic agents, e.g., insulin. An important consideration in the selection of the one or more additional therapeutic agents is that the agent(s) should be compatible with the genetically engineered bacteria of the invention, e.g., the agent(s) must not kill the bacteria. The dosage of the pharmaceutical composition and the frequency of administration may be selected based on the severity of the symptoms and the progression of the disorder. The appropriate therapeutically effective dose and/or frequency of administration can be selected by a treating clinician.

[0931] Treatment In Vivo

[0932] The genetically engineered bacteria of the invention may be evaluated in vivo, e.g., in an animal model. Any suitable animal model of a metabolic disease may be used (see, e.g., Mizoguchi 2012). In some embodiments, the animal is a C57BL/6J mouse that is fed a high fat diet in order to induce obesity and T2DM-related symptoms such as hyperinsulinemia and hyperglycemia. In alternate embodiments, an animal harboring a genetic deficiency that causes a metabolic disease, e.g., a B6.BKS(D)-Lepr^{db/db} mouse, is used.

[0933] The genetically engineered bacteria of the invention are administered to the mice before, during, or after the onset of obesity and disease. Body weight, food intake, and blood plasma (e.g., triglyceride levels, insulin tolerance tests, glucose tolerance tests, pyruvate tolerance tests) may be assayed to determine the severity and amelioration of disease. Metabolism and physical activity may be measured in metabolic cages. Animals may be sacrificed to assay metabolic tissues such as liver, skeletal muscle, epididymal fat, subcutaneous fat, brown fat, pancreas, and brain, are collected for analysis of histology and gene expression.

TABLE 30
Summary of rodent models of type 2 diabetes

| Induction | | | |
|---|---|---|---|
| mechanism | Model | Main features | Possible uses |
| Obese models | Lep^{ob/ob} mice | Obesity-induced | Treatments to improve |
| (monogenic) | | hyperglycaemia | insulin resistance |
| | Lepr^{db/db} mice | | Treatments to improve |
| | ZDF Rats | | beta cell function |
| Obese models | KK mice | Obesity-induced | Treatments to improve |
| (polygenic) | | hyperglycaemia | insulin resistance |
| | OLETF rat | | Treatments to improve |
| | | | beta cell function |
| | NZO mice | | Some models show |
| | TallyHo/Jng mice | | diabetic complications |
| | NoncNZO10/LtJ mice | | |
| Induced obesity | High fat feeding (mice | Obesity-induced | Treatments to improve |
| | or rats) | hyperglycaemia | insulin resistance |
| | Desert gerbil | | Treatments to improve |
| | | | beta cell function |
| | Nile grass rat | | Treatments to prevent |
| | | | diet-induced obesity |
| Non-obese | GK rat | Hyperglycaemia | Treatments to improve |
| models | | induced by | beta cell function |
| | | insufficient beta | Treatments to improve |
| | | cell function/mass | beta cell survival |
| Genetically | hIAPP mice | Amyloid | Treatments to prevent |
| induced models | | deposition in islets | amyloid deposition |
| of beta cell | | | Treatments to improve |
| dysfunction | | | beta cell survival |
| | AKITA mice | Beta cell | Treatments to prevent ER |
| | | destruction due to | stress |
| | | ER stress. | Treatments to improve |
| | | | beta cell survival |

[0934] As described in Aileen JF King, The use of animal models in diabetes research, Br J Pharmacol. 2012 June; 166(3): 877-894.

[0935] The engineered bacteria may be evaluated in vivo, e.g., in an animal model for NASH. Any suitable animal model of a disease associated with Non-Alcoholic Fatty Liver Disease/Non-Alcoholic Steatohepatitis (NAFLD/NASH) may be used. For example, the effects of liver steatosis and hepatic inflammation in an in vivo mouse model have been described (Jun Jin, et al., Brit. J. Nutrition, 114:145-1755 (2015)). To briefly summarize, female C57BL/6J mice can be fasted and fed either a standard liquid diet of carbohydrates, fat, and protein; or a liquid Western style diet (WSD) fortified with fructose, fat, cholesterol, and a sodium butyrate supplement for six weeks. Butyrate is a short chain fatty acid naturally produced by intestinal bacteria effective in maintaining intestinal homoeostasis. Body weight and plasma samples can be taken throughout the duration of the study. Upon conclusion of the study, the mice can be killed, and the liver and intestine can be removed and assayed.

[0936] An in vivo rat model of choline deficient/L-amino acid defined (CDAA) diet has also been described (Endo, et al., PLoS One, 8(5):e63388 (2013)). In this model, rats are fed the CDAA diet for eight weeks and then treated with a strain of Clostridium butyricum (MIYAIRI 588) two weeks after. The diet induces NAFLD/NASH symptoms such as liver steatosis, steatohepatitis, fibrosis, cirrhosis, and hepatocarcinogenesis. The rats are killed at 8, 16, and 50 weeks after completion of the diet regiments, and liver tissues removed and assayed.

[0937] Other models are known in the art, including a Lepob/Lepob and C57BL6 (B6) mouse model used to study the effects of high fat diet and GLP-1 administration within the NASH setting. See, for example, Trevaskis et al., Am. J. Physiology-Gastrointestinal and Liver Physiology, 302(8):G762-G772, 2012, and Takahashi et al., World J. Gastroenterol., 18(19):2300-2308, 2012, the entire contents of each of which are expressly incorporated herein by reference.

### REFERENCES

[0938] Aboulnaga et al. Effect of an oxygen-tolerant bifurcating butyryl coenzyme A dehydrogenase/ electron-transferring flavoprotein complex from Clostridium difficile on butyrate production in Escherichia coli. J Bact. 2013; 195(16):3704-3713.
[0939] Altenhoefer et al. The probiotic Escherichia coli strain Nissle 1917 interferes with invasion of human intestinal epithelial cells by different enteroinvasive bacterial pathogens. FEMS Immunol Med Microbiol. 2004 Apr. 9; 40(3):223-9. PMID: 15039098.
[0940] Arai et al. Expression of the nir and nor genes for denitrification of Pseudomonas aeruginosa requires a novel CRP/FNR-related transcriptional regulator, DNR, in addition to ANR. FEBS Lett. 1995 Aug. 28; 371(1):73-6. PMID: 7664887.
[0941] Brüssow et al. You are what you eat. Nat Biotechnol. 2014 Mar.; 32(3):243-5. PMID: 24727777.
[0942] Callura et al. Tracking, Tuning and terminating microbial physiology using synthetic riboregulators. Proc Natl Acad Sci. 2010; 27(36):15898-15903.
[0943] Castiglione et al. The transcription factor DNR from Pseudomonas aeruginosa specifically requires nitric oxide and haem for the activation of a target promoter in Escherichia coli. Microbiology. 2009 Sep.; 155(Pt 9):2838-44. PubMed PMID: 19477902.
[0944] Chen et al. Incorporation of therapeutically modified bacteria into gut microbiota inhibits obesity. J Clin Invest. 2014 Aug. ; 124(8):3391-406. PMID: 24960158.
[0945] Clarkson et al. Diaminopimelic acid and lysine auxotrophs of Pseudomonas aeruginosa 8602. J Gen Microbiol. 1971 May; 66(2):161-9. PubMed PMID: 4999073.
[0946] De Vadder et al. Microbiota-generated metabolites promote metabolic benefits via gut- brain neural circuits. Cell. 2014 Jan. 16; 156(1-2):84-96. PMID: 24412651.
[0947] Dinleyici et al. Saccharomyces boulardii CNCM 1-745 in different clinical conditions. Expert Opin Biol Ther. 2014 Nov.; 14(11):1593-609. PubMed PMID: 24995675.
[0948] Eiglmeier et al. Molecular genetic analysis of FNR-dependent promoters. Mol Microbiol. 1989 Jul; 3(7):869-78. PubMed PMID: 2677602.
[0949] Frenzel et al. Expression of recombinant antibodies. Front Immunol. 2013; 4:217. PMID: 23908655.
[0950] Galimand et al. Positive FNR-like control of anaerobic arginine degradation and nitrate respiration in Pseudomonas aeruginosa. J Bacteriol. 1991 Mar.; 173(5):1598-606. PubMed PMID: 1900277; PubMed Central PMCID: PMC207308.

[0951] Gallwitz et al. GLP-1-analogues resistant to degradation by dipeptidyl-peptidase IV in vitro. Regul Pept. 2000 Jan 29; 86(1-3):103-11. PubMed PMID: 10672909.
[0952] Gardner et al. Construction of a genetic toggle switch in Escherichia coli. Nature 2000; 403:339-342.
[0953] Harley et al. Obesity and the gut microbiome: Striving for causality. Mol Metab. 2012 Aug. 3; 1(1-2):21-31. PMID: 24024115.
[0954] Hasegawa et al. Activation of a consensus FNR-dependent promoter by DNR of Pseudomonas aeruginosa in response to nitrite. FEMS Microbiol Lett. 1998 Sep. 15; 166(2):213-7. PubMed PMID: 9770276.
[0955] Hetzel et al. Acryloyl-CoA reductase from Clostridium propionicum. An enzyme complex of propionyl-CoA dehydrogenase and electron-transferring flavoprotein. Eur J Biochem. 2003
[0956] Hillman R E. Simple, rapid method for determination of propionic acid and other short-chain fatty acids in serum. Clin Chem. 1978 May; 24(5):800-3. PubMed PMID: 647915.
[0957] Hoeren et al. Sequence and expression of the gene encoding the respiratory nitrous-oxide reductase from Paracoccus denitrificans. New and conserved structural and regulatory motifs. Eur J Biochem. 1993 Nov. 15; 218(1):49-57. PubMed PMID: 8243476.
[0958] Mar; 270(5):902-10. PubMed PMID: 12603323. Hristodorov et al. Recombinant H22(scFv) blocks CD64 and prevents the capture of anti-TNF monoclonal antibody. A potential strategy to enhance anti-TNF therapy. MAbs. 2014; 6(5):1283-9. PMID:25517313.
[0959] Isabella et al. Deep sequencing-based analysis of the anaerobic stimulon in Neisseria gonorrhoeae. BMC Genomics. 2011 Jan. 20; 12:51. PubMed PMID: 21251255.
[0960] Karagiannis et al. Safety of dipeptidyl peptidase 4 inhibitors: a perspective review. Ther Adv Drug Saf. 2014 Jun; 5(3):138-46. PMID: 25083269.
[0961] Keates et al. TransKingdom RNA interference: a bacterial approach to challenges in RNAi therapy and delivery. Biotechnol Genet Eng Rev. 2008; 25:113-27. PubMed PMID: 21412352.
[0962] Kleman et al. Acetate metabolism by Escherichia coli in high-cell-density fermentation. Appl Environ Microbiol. 1994 Nov.; 60(11):3952-8. PMID: 7993084.
[0963] Lin et al. Butyrate and propionate protect against diet-induced obesity and regulate gut hormones via free fatty acid receptor 3-independent mechanisms. PLoS One. 2012; 7(4):e35240. PubMed PMID: 22506074; PubMed Central PMCID: PMC3323649.
[0964] Lukovac et al. Differential modulation by Akkermansia muciniphila and Faecalibacterium prausnitzii of host peripheral lipid metabolism and histone acetylation in mouse gut organoids. MBio. 2014 Aug. 12; 5(4). pii: e01438-14. PubMed PMID: 25118238.

[0965] Mathur et al. Obesity and the microbiome. Expert Rev Gastroenterol Hepatol. 2015 Jun. 16:1-13. PubMed PMID: 26082274.
[0966] Meadow et al. Biosynthesis of diaminopimelic acid and lysine in Escherichia coli. Biochem J. 1959 Jul.; 72(3):396-400. PubMed PMID: 16748796.
[0967] Mizoguchi. Animal models of inflammatory bowel disease. Prog Mol Biol Transl Sci. 2012; 105:263-320. PubMed PMID: 22137435.
[0968] Moore et al. Regulation of FNR dimerization by subunit charge repulsion. J Biol Chem. 2006 Nov. 3; 281(44):33268-75. PubMed PMID: 16959764.
[0969] Musso et al. Gut microbiota as a regulator of energy homeostasis and ectopic fat deposition: mechanisms and implications for metabolic disorders. Curr Opin Lipidol. 2010 Feb.; 21(1):76-83. Review. PubMed PMID: 19915460.
[0970] Nissen et al. Effect of rosiglitazone on the risk of myocardial infarction and death from cardiovascular causes. N Engl J Med. 2007 Jun. 14; 356(24):2457-71. PMID: 17517853.
[0971] Purcell et al. Towards a whole-cell modeling approach for synthetic biology. Chaos. 2013 Jun.; 23(2):025112. PMID: 23822510.
[0972] Ragsdale. Enzymology of the wood-Ljungdahl pathway of acetogenesis. Ann N Y Acad Sci. 2008 Mar; 1125:129-36. PMID: 18378591.
[0973] Ray et al. The effects of mutation of the anr gene on the aerobic respiratory chain of Pseudomonas aeruginosa. FEMS Microbiol Lett. 1997 Nov. 15; 156(2):227-32. PubMed PMID: 9513270.
[0974] Reister et al. Complete genome sequence of the Gram-negative probiotic Escherichia coli strain Nissle 1917. J Biotechnol. 2014 Oct. 10; 187:106-7. PubMed PMID: 25093936.
[0975] Rembacken et al. Non-pathogenic Escherichia coli versus mesalazine for the treatment of ulcerative colitis: a randomised trial. Lancet. 1999 Aug. 21; 354(9179):635-9. PubMed PMID: 10466665.
[0976] Remington's Pharmaceutical Sciences, 22^{nd} ed. Mack Publishing Co.
[0977] Sat et al. The Escherichia coli mazEF suicide module mediates thymineless death. J Bacteriol. 2003 Mar.; 185(6):1803-7. PubMed PMID: 12618443.
[0978] Sawers. Identification and molecular characterization of a transcriptional regulator from Pseudomonas aeruginosa PAO1 exhibiting structural and functional similarity to the FNR protein of Escherichia coli. Mol Microbiol. 1991 Jun; 5(6):1469-81. PubMed PMID: 1787797.
[0979] Schiel-Bengelsdorf et al. Pathway engineering and synthetic biology using acetogens. FEBS Lett. 2012 Jul. 16; 586(15):2191-8. PMID: 22710156.
[0980] Schultz. Clinical use of E. coli Nissle 1917 in inflammatory bowel disease. Inflamm Bowel Dis. 2008 Jul.; 14(7):1012-8. Review. PubMed PMID: 18240278.
[0981] Selmer et al. Propionate CoA-transferase from Clostridium propionicum. Cloning of gene and identification of glutamate 324 at the active site. Eur J Biochem. 2002 Jan; 269(1):372-80. PubMed PMID: 11784332.
[0982] Sonnenborn et al. The non-pathogenic Escherichia coli strain Nissle 1917 - features of a versatile probiotic. Microbial Ecology in Health and Disease. 2009; 21:122-158.
[0983] Térová et al. N-acyl phosphatidylethanolamines affect the lateral distribution of cholesterol in membranes. Biochim Biophys Acta. 2005 Aug. 30; 1715(1):49-56. PMID: 16087152.
[0984] Trunk et al. Anaerobic adaptation in Pseudomonas aeruginosa: definition of the Anr and Dnr regulons. Environ Microbiol. 2010 Jun.; 12(6):1719-33. PMID: 20553552.

[0985] Tseng et al. Controlled biosynthesis of odd-chain fuels and chemicals via engineered modular metabolic pathways. Proc Natl Acad Sci USA. 2012 Oct. 30; 109(44):17925-30. PubMed PMID:23071297; PubMed Central PMCID: PMC3497732.
[0986] Ukena et al. Probiotic Escherichia coli Nissle 1917 inhibits leaky gut by enhancing mucosal integrity. PLoS One. 2007 Dec. 12; 2(12):e1308. PMID: 18074031.
[0987] Unden et al. Alternative respiratory pathways of Escherichia coli: energetics and transcriptional regulation in response to electron acceptors. Biochim Biophys Acta. 1997 Jul. 4; 1320(3):217-34. PMID: 9230919.
[0988] Winteler et al. The homologous regulators ANR of Pseudomonas aeruginosa and FNR of Escherichia coli have overlapping but distinct specificities for anaerobically inducible promoters. Microbiology. 1996 Mar.; 142 (Pt 3):685-93. PubMed PMID: 8868444.
[0989] Xiao et al. Nanoparticles with surface antibody against CD98 and carrying CD98 small interfering RNA reduce colitis in mice. Gastroenterology. 2014 May; 146(5):1289-300. PMID: 24503126.
[0990] Yazbeck et al. Growth factor based therapies and intestinal disease: is glucagon-like peptide-2 the new way forward? Cytokine Growth Factor Rev. 2009 Apr; 20(2):175-84. PMID: 19324585.
[0991] Zimmermann et al. Anaerobic growth and cyanide synthesis of Pseudomonas aeruginosa depend on anr, a regulatory gene homologous with fnr of Escherichia coli. Mol Microbiol. 1991 Jun.; 5(6):1483-90. PubMed PMID: 1787798.

### EXAMPLES

[0992] The following examples provide illustrative embodiments of the disclosure. One of ordinary skill in the art will recognize the numerous modifications and variations that may be performed without altering the spirit or scope of the disclosure. Such modifications and variations are encompassed within the scope of the disclosure. The Examples do not in any way limit the disclosure.

### Example 1

### Construction of Vectors for Producing Propionate

[0993] To facilitate inducible production of propionate in Escherichia coli Nissle, a propionate gene cassette comprising the genes encoding the enzymes of the acrylate pathway, i.e., pct, lcdA, lcdB, lcdC, etfA, acrB, and acrC, as well as transcriptional and translational elements, are synthesized (Gen9, Cambridge, Mass.) and cloned into vector pBR322. The genes are codon-optimized for E. coli codon usage using Integrated DNA Technologies online codon optimization tool (https://www.idtdna.com/CodonOpt). A second clone is generated as described above using a propionate gene cassette comprising the genes encoding the enzymes of the pyruvate pathway, i.e., thrA^{fr}, thrB, thrC, ilvA^{fbr}, aceE, aceF, and lpd; NCBI; Tseng et al., 2012). A third clone is generated as described above that comprises thrA^{fbr}, thrB, thrC, ilvA^{fbr}, aceE, aceF, lpd, and E. coli tesB. Each propionate gene cassette is expressed under the control of each of the following regulatory regions: a FNR-inducible regulatory region selected from the sequences listed in Table 21, a tetracycline-inducible promoter, and an arabinose-inducible promoter. In certain constructs, the FNR-responsive promoter is further fused to a strong ribosome binding site sequence. For efficient translation of propionate genes, each synthetic gene in the operon was separated by a 15 base pair ribosome binding site derived from the T7 promoter/translational start site. Each gene cassette and regulatory region construct is expressed on a high-copy plasmid, a low-copy plasmid, or a chromosome.

[0994] The propionate construct is inserted into the bacterial genome at one or more of the following insertion sites in E. coli Nissle: malE/K, araC/BAD, lacZ, thyA, malP/T. Any suitable insertion site may be used (see, e.g., FIG. 57). The insertion site may be anywhere in the genome, e.g., in a gene required for survival and/or growth, such as thyA (to create an auxotroph); in an active area of the genome, such as near the site of genome replication; and/or in between divergent promoters in order to reduce the risk of unintended transcription, such as between AraB and AraC of the arabinose operon. At the site of insertion, DNA primers that are homologous to the site of insertion and to the propionate construct are designed. A linear DNA fragment containing the construct with homology to the target site is generated by PCR, and lambda red recombination is performed as described below. The resulting E. coli Nissle bacteria are genetically engineered to express a propionate biosynthesis cassette and produce propionate.

### Example 2

### Lambda Red Recombination

[0995] Lambda red recombination is used to make chromosomal modifications, e.g., to express a propionate biosynthesis cassette in E. coli Nissle. Lambda red is a procedure using recombination enzymes from a bacteriophage lambda to insert a piece of custom DNA into the chromosome of E. coli . A pKD46 plasmid is transformed into the E. coli Nissle host strain. E. coli Nissle cells are grown overnight in LB media. The overnight culture is diluted 1:100 in 5 mL of LB media and grown until it reaches an OD₆₀₀ of 0.4-0.6. All tubes, solutions, and cuvettes are pre-chilled to 4° C. The E. coli cells are centrifuged at 2,000 rpm for 5 min. at 4° C., the supernatant is removed, and the cells are resuspended in 1 mL of 4° C. water. The E. coli are centrifuged at 2,000 rpm for 5 min. at 4° C., the supernatant is removed, and the cells are resuspended in 0.5 mL of 4° C. water. The E. coli are centrifuged at 2,000 rpm for 5 min. at 4° C., the supernatant is removed, and the cells are resuspended in 0.1 mL of 4° C. water. The electroporator is set to 2.5 kV. 1 ng of pKD46 plasmid DNA is added to the E. coli cells, mixed by pipetting, and pipetted into a sterile, chilled cuvette. The dry cuvette is placed into the sample chamber, and the electric pulse is applied. 1 mL of room-temperature SOC media is immediately added, and the mixture is transferred to a culture tube and incubated at 30° C. for 1 hr. The cells are spread out on a selective media plate and incubated overnight at 30° C.

[0996] DNA sequences comprising the desired propionate biosynthesis genes shown above were ordered from a gene synthesis company. The lambda enzymes are used to insert this construct into the genome of E. coli Nissle through homologous recombination. The construct is inserted into a specific site in the genome of E. coli Nissle based on its DNA sequence. In some embodiments, the construct is in the E. coli Nissle genome at the malP/T site (FIG. 57). To insert the construct into a specific site, the homologous DNA sequence flanking the construct is identified, and includes approximately 50 bases on either side of the sequence. The homologous sequences are ordered as part of the synthesized gene. Alternatively, the homologous sequences may be added by PCR. The construct includes an antibiotic resistance marker that may be removed by recombination. The resulting construct comprises approximately 50 bases of homology upstream, a kanamycin resistance marker that can be removed by recombination, the propionate biosynthesis genes, and approximately 50 bases of homology downstream.

### Example 3

### Transforming E. coli

[0997] Each of the constructs above is transformed into E. coli Nissle comprising pKD46. All tubes, solutions, and cuvettes are pre-chilled to 4° C. An overnight culture is diluted 1:100 in 5 mL of LB media containing ampicillin and grown until it reaches an OD₆₀₀ of 0.1. 0.05 mL of 100× L-arabinose stock solution is added to induce pKD46 lambda red expression. The culture is grown until it reaches an OD₆₀₀ of 0.4-0.6. The E. coli cells are centrifuged at 2,000 rpm for 5 min. at 4° C., the supernatant is removed, and the cells are resuspended in 1 mL of 4° C. water. The E. coli are centrifuged at 2,000 rpm for 5 min. at 4° C., the supernatant is removed, and the cells are resuspended in 0.5 mL of 4° C. water. The E. coli are centrifuged at 2,000 rpm for 5 min. at 4° C., the supernatant is removed, and the cells are resuspended in 0.1 mL of 4° C. water. The electroporator is set to 2.5 kV. 0.5 μg of the construct is added to the cells, mixed by pipetting, and pipetted into a sterile, chilled cuvette. The dry cuvette is placed into the sample chamber, and the electric pulse is applied. 1 mL of room-temperature SOC media is immediately added, and the mixture is transferred to a culture tube and incubated at 37° C. for 1 hr. The cells are spread out on an LB plate containing kanamycin and incubated overnight.

[0998] In alternate embodiments, the propionate cassette may be inserted into the Nissle genome through homologous recombination (Genewiz, Cambridge, Mass.). Organization of the constructs and nucleotide sequences are shown in FIGS. 1-5. To create a vector capable of integrating the synthesized propionate cassette construct into the chromosome, Gibson assembly was first used to add 1000 bp sequences of DNA homologous to the Nissle lacZ locus into the R6K origin plasmid pKD3. This targets DNA cloned between these homology arms to be integrated into the lacZ locus in the Nissle genome. Gibson assembly was used to clone the fragment between these arms. PCR was used to amplify the region from this plasmid containing the entire sequence of the homology arms, as well as the propionate cassette between them. This PCR fragment was used to transform electrocompetent Nissle-pKD46, a strain that contains a temperature-sensitive plasmid encoding the lambda red recombinase genes. After transformation, cells were grown out for 2 hours before plating on chloramphenicol at 20 ug/mL at 37 degrees C. Growth at 37 degrees C. also cures the pKD46 plasmid. Transformants containing cassette were chloramphenicol resistant and lac-minus (lac−).

### Example 4

### Verifying Mutants

[0999] The presence of the propionate gene cassette is verified by colony PCR. Colonies are picked with a pipette tip and resuspended in 20 pi of cold ddH₂O by pipetting up and down. 3 μl of the suspension is pipetted onto an index plate with appropriate antibiotic for use later. The index plate is grown at 37° C. overnight. A PCR master mix is made using 5 μl of 10× PCR buffer, 0.6 μl of 10 mM dNTPs, 0.4 μl of 50 mM Mg₂SO₄, 6.0 μl of 10× enhancer, and 3.0 μl of ddH₂O (15 μl of master mix per PCR reaction). A 10 μM primer mix is made by mixing 2 μL of primers unique to the propionate construct (100 μM stock) into 16 μL of ddH₂O. For each 20 μl reaction, 15 μL of the PCR master mix, 2.0 μL of the colony suspension (template), 2.0 μL of the primer mix, and 1.0 μL of Pfx Platinum DNA Pol are mixed in a PCR tube. The PCR thermocycler is programmed as follows, with steps 2-4 repeating 34 times: 1) 94° C. at 5:00 min., 2) 94° C. at 0:15 min., 3) 55° C. at 0:30 min., 4) 68° C. at 2:00 min., 5) 68° C. at 7:00 min., and then cooled to 4° C. The PCR products are analyzed by gel electrophoresis using 10 μL of each amplicon and 2.5 μL 5× dye. The PCR product only forms if the heterologous sequence has been inserted.

### Example 5

### Generation of ΔThyA

[1000] An auxotrophic mutation causes bacteria to die in the absence of an exogenously added nutrient essential for survival or growth because they lack the gene(s) necessary to produce that essential nutrient. In order to generate genetically engineered bacteria with an auxotrophic modification, the thyA, a gene essential for oligonucleotide synthesis was deleted. Deletion of the thyA gene in E. coli Nissle yields a strain that cannot form a colony on LB plates unless they are supplemented with thymidine.

[1001] A thyA::cam PCR fragment was amplified using 3 rounds of PCR as follows. Sequences of the primers used at a 100 um concentration are found in Table 31.

TABLE 31
Primer Sequences

| | | | SEQ ID |
|---|---|---|---|
| Name | Sequence | Description | NO |
| SR36 | tagaactgatgcaaaaagtgctcgacgaaggcacacagaTGTGTAG | Round 1: binds | SEQ ID |
| | GCTGGAGCTGCTTC | on pKD3 | NO: 215 |
| SR38 | gtttcgtaattagatagccaccggcgctttaatgcccggaCATATGAA | Round 1: binds | SEQ ID |
| | TATCCTCCTTAG | on pKD3 | NO: 216 |
| SR33 | caacacgtttcctgaggaaccatgaaacagtatttagaactgatgcaaaaag | Round 2: binds | SEQ ID |
| | | to round 1 PCR | NO: 217 |
| | | product | |
| SR34 | cgcacactggcgtcggctctggcaggatgtttcgtaattagatagc | Round 2: binds | SEQ ID |
| | | to round 1 PCR | NO: 218 |
| | | product | |
| SR43 | atatcgtcgcagcccacagcaacacgtttcctgagg | Round 3: binds | SEQ ID |
| | | to round 2 PCR | NO: 219 |
| | | product | |
| SR44 | aagaatttaacggagggcaaaaaaaaccgacgcacactggcgtcggc | Round 3: binds | SEQ ID |
| | | to round 2 PCR | NO: 220 |
| | | product | |

[1002] For the first PCR round, 4×50 ul PCR reactions containing ing pKD3 as template, 25 ul 2×phusion, 0.2ul primer SR36 and SR38, and either 0, 0.2, 0.4 or 0.6 ul DMSO were brought up to 50 ul volume with nuclease free water and amplified under the following cycle conditions:

[1003] stepl: 98 c for 30 s

[1004] step2: 98 c for 10 s

[1005] step3: 55 c for 15 s

[1006] step4: 72 c for 20 s

[1007] repeat step 2-4 for 30 cycles

[1008] step5: 72 c for 5 min

[1009] Subsequently, 5 ul of each PCR reaction was run on an agarose gel to confirm PCR product of the appropriate size. The PCR product was purified from the remaining PCR reaction using a Zymoclean gel DNA recovery kit according to the manufacturer's instructions and eluted in 30 ul nuclease free water.

[1010] For the second round of PCR, lul purified PCR product from round 1 was used as template, in 4×50 ul PCR reactions as described above except with 0.2 ul of primers SR33 and SR34. Cycle conditions were the same as noted above for the first PCR reaction. The PCR product run on an agarose gel to verify amplification, purified, and eluted in 30 ul as described above.

[1011] For the third round of PCR, lul of purified PCR product from round 2 was used as template in 4×50 ul PCR reactions as described except with primer SR43 and SR44. Cycle conditions were the same as described for rounds 1 and 2. Amplification was verified, the PCR product purified, and eluted as described above. The concentration and purity was measured using a spectrophotometer. The resulting linear DNA fragment, which contains 92 bp homologous to upstream of thyA, the chloramphenicol cassette flanked by frt sites, and 98 bp homologous to downstream of the thyA gene, was transformed into a E. coli Nissle 1917 strain containing pKD46 grown for recombineering. Following electroporation, lml SOC medium containing 3 mM thymidine was added, and cells were allowed to recover at 37 C for 2 h with shaking. Cells were then pelleted at 10,000×g for 1 minute, the supernatant was discarded, and the cell pellet was resuspended in 100 ul LB containing 3 mM thymidine and spread on LB agar plates containing 3 mM thy and 20 ug/ml chloramphenicol. Cells were incubated at 37 C overnight. Colonies that appeared on LB plates were restreaked. +cam 20 ug/ml + or − thy 3 mM. (thyA auxotrophs will only grow in media supplemented with thy 3 mM).

[1012] Next, the antibiotic resistance was removed with pCP20 transformation. pCP20 has the yeast Flp recombinase gene, FLP, chloramphenicol and ampicillin resistant genes, and temperature sensitive replication. Bacteria were grown in LB media containing the selecting antibiotic at 37° C. until OD600=0.4-0.6. 1mL of cells were washed as follows: cells were pelleted at 16,000×g for 1 minute. The supernatant was discarded and the pellet was resuspended in 1 mL ice-cold 10% glycerol. This wash step was repeated 3× times. The final pellet was resuspended in 70 ul ice-cold 10% glycerol. Next, cells were electroporated with ing pCP20 plasmid DNA, and 1 mL SOC supplemented with 3 mM thymidine was immediately added to the cuvette. Cells were resuspended and transferred to a culture tube and grown at 30° C. for lhours. Cells were then pelleted at 10,000×g for 1 minute, the supernatant was discarded, and the cell pellet was resuspended in 100 ul LB containing 3 mM thymidine and spread on LB agar plates containing 3 mM thy and 100ug/mlcarbenicillin and grown at 30° C. for 16-24 hours. Next, transformants were colony purified non-selectively (no antibiotics) at 42° C.

[1013] To test the colony-purified transformants, a colony was picked from the 42° C. plate with a pipette tip and resuspended in 10 μL LB. 3 μl, of the cell suspension was pipetted onto a set of 3 plates: Cam, (37° C.; tests for the presence/absence of CamR gene in the genome of the host strain), Amp, (30° C., tests for the presence/absence of AmpR from the pCP20 plasmid) and LB only (desired cells that have lost the chloramphenicol cassette and the pCP20 plasmid), 37° C. Colonies were considered cured if there is no growth in neither the Cam or Amp plate, picked, and re-streaked on an LB plate to get single colonies, and grown overnight at 37° C.

### Example 6

### Production of Propionate in Genetically Engineered E. coli

[1014] Production of propionate is assessed in E. coli Nissle strains containing the propionate cassettes described above. All incubations are performed at 37° C. Cultures of E. coli strains DH5a and Nissle transformed with the propionate cassettes are grown overnight in LB and then diluted 1:200 into 4 mL of M9 minimal medium containing 0.5% glucose. The cells are grown with shaking (250 rpm) for 4-6 h, and the inducible constructs are induced as follows: (1) bacteria comprising a propionate gene cassette driven by a FNR-inducible promoter are induced in LB at 37C for up to 4 hours in anaerobic conditions in a Coy anaerobic chamber (supplying 90% N2, 5% CO2, 5%H2, and 20 mM nitrate) at 37° C.; (2) bacteria comprising a propionate gene cassette driven by a tetracycline-inducible promoter are induced with anhydrotetracycline (100 ng/mL); (3) bacteria comprising a propionate gene cassette driven by a arabinose-inducible promoter are induced with 1% arabinose in media lacking glucose. One mL culture aliquots are prepared in 1.5 mL capped tubes and FNR-inducible constructs are incubated in a stationary incubator to limit culture aeration. One tube is removed at each time point (0, 1, 2, 4, and 20 hours) and analyzed for propionate concentration by LC-MS to confirm that propionate production in these recombinant strains can be achieved in a low-oxygen environment.

### Example 7

### Efficacy of Propionate-Expressing Bacteria in a Mouse Model of Obesity and Type 2 Diabetes Mellitus (T2DM)

[1015] For in vivo studies to assess the efficacy of the genetically engineered bacteria in an animal model of obesity and type 2 diabetes, C57BL/6J mice are fed a high fat diet (60 kcal % fat, Research Diets Inc.) starting from 4-5 weeks of age for 8 weeks or until body weight is at least 45 g in order to induce obesity and T2DM-related symptoms such as hyperinsulinemia and hyperglycemia, e.g., glycaemia above 160 mg/dL and plasma insulin above 4000 pg/mL. Alternatively, B6.BKS(D)-Lepr^{db/db} mice (Lepr^{db/db}) are obtained from The Jackson Laboratory; these mice typically become obese and display T2DM-related symptoms beginning at 10 weeks of age.

[1016] Bacteria harboring the propionate gene cassette described above are grown overnight in LB. Bacteria are then diluted 1:100 into LB containing a suitable selection marker, e.g., ampicillin, and grown to an optical density of 0.4-0.5 and then pelleted by centrifugation. To analyze the efficacy of the bacteria in vivo, bacteria are resuspended in phosphate buffered saline (PBS) and 100 microliters is administered by oral gavage to mice daily for 8 weeks. Alternatively, the bacteria can be supplemented in the drinking water (5×10⁹ CFU bacteria/mL).

[1017] Body weight and food intake are measured weekly before, during, and after the administration of the bacteria. In addition, mice are subjected to insulin tolerance tests (ITT), glucose tolerance tests (GTT) and pyruvate tolerance tests (PTT) to determine the severity of T2DM during treatment, e.g., amelioration of insulin resistance. For ITT, mice are fasted overnight and injected with insulin (1 U/kg, diluted in PBS). Blood glucose levels are measured prior to the injection and at 20, 40, 60, and 90 min. post injection via tail bleeding. For GTT, mice are fasted overnight and injected with glucose solution (1 g/kg, dissolved in PBS); blood glucose levels are measured as described above in order to determine changes. For PTT, mice are fasted overnight and injected with sodium pyruvate solution (lg/kg, dissolved in PBS); blood glucose levels are measured as described above. Whole-body metabolic functions are analyzed by placing the mice in a Comprehensive Lab Animal Monitoring System (CLAMS), which monitors physical activity, food intake, metabolic rate (as a function of O₂ consumption and CO₂ production). Mice are sacrificed and metabolic tissues such as liver, skeletal muscle, epididymal fat, subcutaneous fat, brown fat, pancreas, and brain, are collected for analysis of histology, e.g., Oil Red O staining of the liver, and gene expression.

### Example 8

### Nissle Residence

[1018] Unmodified E. coli Nissle and the genetically engineered bacteria of the invention may be destroyed, e.g., by defense factors in the gut or blood serum. The residence time of bacteria in vivo may be calculated. A non-limiting example using a streptomycin-resistant strain of E. coli Nissle is described below. In alternate embodiments, residence time is calculated for the genetically engineered bacteria of the invention.

[1019] C57BL/6 mice were acclimated in the animal facility for 1 week. After one week of acclimation (i.e., day 0), streptomycin-resistant Nissle (SYN-103) was administered to the mice via oral gavage on days 1-3. Mice were not pre-treated with antibiotic. The amount of bacteria administered, i.e., the inoculant, is shown in Table 32. In order to determine the CFU of the inoculant, the inoculant was serially diluted, and plated onto LB plates containing streptomycin (300 μg/mL). The plates were incubated at 37° C. overnight, and colonies were counted.

TABLE 32
CFU administered via oral gavage
CFU administered via oral gavage

| Strain | Day 1 | Day 2 | Day 3 |
|---|---|---|---|
| SYN-103 | 1.30E+08 | 8.50E+08 | 1.90E+09 |

[1020] On days 2-10, fecal pellets were collected from up to 6 mice (ID NOs. 1-6; Table 14). The pellets were weighed in tubes containing PBS and homogenized. In order to determine the CFU of Nissle in the fecal pellet, the homogenized fecal pellet was serially diluted, and plated onto LB plates containing streptomycin (300 μg/mL). The plates were incubated at 37° C. overnight, and colonies were counted.

[1021] Fecal pellets from day 1 were also collected and plated on LB plates containing streptomycin (300 μg/mL) to determine if there were any strains native to the mouse gastrointestinal tract that were streptomycin resistant. The time course and amount of administered Nissle still residing within the mouse gastrointestinal tract is shown in Table 33.

[1022] FIG. 84 depicts a graph of Nissle residence in vivo. Streptomycin-resistant Nissle was administered to mice via oral gavage without antibiotic pre-treatment. Fecal pellets from six total mice were monitored post-administration to determine the amount of administered Nissle still residing within the mouse gastrointestinal tract. The bars represent the number of bacteria administered to the mice. The line represents the number of Nissle recovered from the fecal samples each day for 10 consecutive days.

TABLE 33
Nissle residence in vivo

| ID | Day 2 | Day 3 | Day 4 | Day 5 |
|---|---|---|---|---|
| 1 | 2.40E+05 | 6.50E+03 | 6.00E+04 | 2.00E+03 |
| 2 | 1.00E+05 | 1.00E+04 | 3.30E+04 | 3.00E+03 |
| 3 | 6.00E+04 | 1.70E+04 | 6.30E+04 | 2.00E+02 |
| 4 | 3.00E+04 | 1.50E+04 | 1.10E+05 | 3.00E+02 |
| 5 | | 1.00E+04 | 3.00E+05 | 1.50E+04 |
| 6 | | 1.00E+06 | 4.00E+05 | 2.30E+04 |
| Avg | 1.08E+05 | 1.76E+05 | 1.61E+05 | 7.25E+03 |

| ID | Day 6 | Day 7 | Day 8 | Day 9 | Day 10 |
|---|---|---|---|---|---|
| 1 | 9.10E+03 | 1.70E+03 | 4.30E+03 | 6.40E+03 | 2.77E+03 |
| 2 | 6.00E+03 | 7.00E+02 | 6.00E+02 | 0.00E+00 | 0.00E+00 |
| 3 | 1.00E+02 | 2.00E+02 | 0.00E+00 | 0.00E+00 | 0.00E+00 |
| 4 | 1.50E+03 | 1.00E+02 | | 0.00E+00 | 0.00E+00 |
| 5 | 3.10E+04 | 3.60E+03 | | 0.00E+00 | 0.00E+00 |
| 6 | 1.50E+03 | 1.40E+03 | 4.20E+03 | 1.00E+02 | 0.00E+00 |
| Avg | 8.20E+03 | 1.28E+03 | 2.28E+03 | 1.08E+03 | 4.62E+02 |

### Example 9

### Intestinal Residence and Survival of Bacterial Strains In Vivo

[1023] Localization and intestinal residence time of streptomycin resistant Nissle, FIG. 85) was determined. Mice were gavaged, sacrificed at various time points, and effluents were collected from various areas of the small intestine cecum and colon.

[1024] Bacterial cultures were grown overnight and pelleted. The pellets were resuspended in PBS at a final concentration of approximately 10¹⁰ CFU/mL. Mice (C57BL6/J, 10-12 weeks old) were gavaged with 100 μL of bacteria (approximately 10⁹ CFU). Drinking water for the mice was changed to contain 0.1 mg/mL anhydrotetracycline (ATC) and 5% sucrose for palatability. At each timepoint (1, 4, 8, 12, 24, and 30 hours post-gavage), animals (n=4) were euthanized, and intestine, cecum, and colon were removed. The small intestine was cut into three sections, and the large intestine and colon each into two sections. Each section was flushed with 0.5 ml cold PBS and collected in separate 1.5 ml tubes. The cecum was harvested, contents were squeezed out, and flushed with 0.5 ml cold PBS and collected in a 1.5 ml tube. Intestinal effluents were placed on ice for serial dilution plating.

[1025] In order to determine the CFU of bacteria in each effluent, the effluent was serially diluted, and plated onto LB plates containing kanamycin. The plates were incubated at 37° C. overnight, and colonies were counted. The amount of bacteria and residence time in each compartment is shown in FIG. 85.

### Example 10

### Construction of Vectors for Overproducing Butyrate

[1026] In addition to the ammonia conversion circuit, GABA transport circuit, GABA metabolic circuit, and/or manganese transport circuit described above, the E. coli Nissle bacteria further comprise one or more circuits for producing a gut barrier enhancer molecule.

[1027] To facilitate inducible production of butyrate in E. coli Nissle, the eight genes of the butyrate production pathway from Peptoclostridium difficile 630 (bcd2, etfB3, etfA3, thiA1, hbd, crt2, bpt, and buk; NCBI), as well as transcriptional and translational elements, were synthesized (Gen9, Cambridge, Mass.) and cloned into vector pBR322. The butyrate gene cassette is placed under the control of a FNR regulatory region selected from (SEQ ID NOs: 177-188) (Table 18 or Table 19) In certain constructs, the FNR-responsive promoter is further fused to a strong ribosome binding site sequence. For efficient translation of butyrate genes, each synthetic gene in the operon was separated by a 15 base pair ribosome binding site derived from the T7 promoter/translational start site.

[1028] In certain constructs, the butyrate gene cassette is placed under the control of an RNS-responsive regulatory region, e.g., norB, and the bacteria further comprises a gene encoding a corresponding RNS-responsive transcription factor, e.g., nsrR (see, e.g., Tables 34 and 35). In certain constructs, the butyrate gene cassette is placed under the control of an ROS-responsive regulatory region, e.g., oxyS, and the bacteria further comprises a gene encoding a corresponding ROS-responsive transcription factor, e.g., oxyR (see, e.g., Tables 14-17). In certain constructs, the butyrate gene cassette is placed under the control of a tetracycline-inducible or constitutive promoter.

TABLE 34
pLogic031-nsrR-norB-butyrate construct (SEQ ID NO: 221)

| | Nucleotide sequences of pLogic031-nsrR-norB-butyrate |
|---|---|
| Description | construct (SEQ ID NO: 221) |
| Nucleic acid | ttattatcgcaccgcaatcgggattttcgattcataaagcagg |
| sequence of an | tcgtaggtcggcttgttgagcaggtcttgcagcgtgaaaccgt |
| exemplary RNS- | ccagatacgtgaaaaacgacttcattgcaccgccgagtatgcc |
| regulated | cgtcagccggcaggacggcgtaatcaggcattcgttgttcggg |
| construct | cccatacactcgaccagctgcatcggttcgaggtggcggacga |
| comprising a gene | ccgcgccgatattgatgcgttcgggcggcgcggccagcctcag |
| encoding nsrR, a | cccgccgcctttcccgcgtacgctgtgcaagaacccgcctttg |
| regulatory region | accagcgcggtaaccactttcatcaaatggcttttggaaatgc |
| of norB, and a | cgtaggtcgaggcgatggtggcgatattgaccagcgcgtcgtc |
| butyrogenic gene | gttgacggcggtgtagatgaggacgcgcagcccgtagtcggta |
| cassette | tgttgggtcagatacatacaacctccttagtacatgcaaaatt |
| (pLogic031-nsrR- | atttctagagcaacatacgagccggaagcataaagtgtaaagc |
| norB-butyrate | ctggggtgcctaatgagttgagttgaggaattataacaggaag |
| construct; SEQ. ID | aaatattcctcatacgcttgtaattcctctatggttgttgaca |
| NO: 79). The | [chemical structure] |
| sequence | [chemical structure] |
| encoding NsrR is | gatatacatatggatttaaattctaaaaaatatcagatgctta |
| underlined and | aagagctatatgtaagcttcgctgaaaatgaagttaaaccttt |
| bolded, and the | agcaacagaacttgatgaagaagaaagatttccttatgaaaca |
| NsrR binding site, | gtggaaaaaatggcaaaagcaggaatgatgggtataccatatc |
| i.e., a regulatory | caaaagaatatggtggagaaggtggagacactgtaggatatat |
| region of norB is | aatggcagttgaagaattgtctagagtttgtggtactacagga |
| [chemical structure] | gttatattatcagctcatacatctcttggctcatggcctatat |
| | atcaatatggtaatgaagaacaaaaacaaaaattcttaagacc |
| | actagcaagtggagaaaaattaggagcatttggtcttactgag |
| | cctaatgctggtacagatgcgtctggccaacaaacaactgctg |
| | ttttagacggggatgaatacatacttaatggctcaaaaatatt |
| | tataacaaacgcaatagctggtgacatatatgtagtaatggca |
| | atgactgataaatctaaggggaacaaaggaatatcagcattta |
| | tagttgaaaaaggaactcctgggtttagctttggagttaaaga |
| | aaagaaaatgggtataagaggttcagctacgagtgaattaata |
| | tttgaggattgcagaatacctaaagaaaatttacttggaaaag |
| | aaggtcaaggatttaagatagcaatgtctactcttgatggtgg |
| | tagaattggtatagctgcacaagctttaggtttagcacaaggt |
| | gctcttgatgaaactgttaaatatgtaaaagaaagagtacaat |
| | ttggtagaccattatcaaaattccaaaatacacaattccaatt |
| | agctgatatggaagttaaggtacaagcggctagacaccttgta |
| | tatcaagcagctataaataaagacttaggaaaaccttatggag |
| | tagaagcagcaatggcaaaattatttgcagctgaaacagctat |
| | ggaagttactacaaaagctgtacaacttcatggaggatatgga |
| | tacactcgtgactatccagtagaaagaatgatgagagatgcta |
| | agataactgaaatatatgaaggaactagtgaagttcaaagaat |
| | ggttatttcaggaaaactattaaaatagtaagaaggagatata |
| | catatggaggaaggatttatgaatatagtcgtttgtataaaac |
| | aagttccagatacaacagaagttaaactagatcctaatacagg |
| | tactttaattagagatggagtaccaagtataataaaccctgat |
| | gataaagcaggtttagaagaagctataaaattaaaagaagaaa |
| | tgggtgctcatgtaactgttataacaatgggacctcctcaagc |
| | agatatggctttaaaagaagctttagcaatgggtgcagataga |
| | ggtatattattaacagatagagcatttgcgggtgctgatactt |
| | gggcaacttcatcagcattagcaggagcattaaaaaatataga |
| | ttttgatattataatagctggaagacaggcgatagatggagat |
| | actgcacaagttggacctcaaatagctgaacatttaaatcttc |
| | catcaataacatatgctgaagaaataaaaactgaaggtgaata |
| | tgtattagtaaaaagacaatttgaagattgttgccatgactta |
| | aaagttaaaatgccatgccttataacaactcttaaagatatga |
| | acacaccaagatacatgaaagttggaagaatatatgatgcttt |
| | cgaaaatgatgtagtagaaacatggactgtaaaagatatagaa |
| | gttgacccttctaatttaggtcttaaaggttctccaactagtg |
| | tatttaaatcatttacaaaatcagttaaaccagctggtacaat |
| | atacaatgaagatgcgaaaacatcagctggaattatcatagat |
| | aaattaaaagagaagtatatcatataataagaaggagatatac |
| | atatgggtaacgttttagtagtaatagaacaaagagaaaatgt |
| | aattcaaactgtttctttagaattactaggaaaggctacagaa |
| | atagcaaaagattatgatacaaaagtttctgcattacttttag |
| | gtagtaaggtagaaggtttaatagatacattagcacactatgg |
| | tgcagatgaggtaatagtagtagatgatgaagctttagcagtg |
| | tatacaactgaaccatatacaaaagcagcttatgaagcaataa |
| | aagcagctgaccctatagttgtattatttggtgcaacttcaat |
| | aggtagagatttagcgcctagagtttctgctagaatacataca |
| | ggtcttactgctgactgtacaggtcttgcagtagctgaagata |
| | caaaattattattaatgacaagacctgcctttggtggaaatat |
| | aatggcaacaatagtttgtaaagatttcagacctcaaatgtct |
| | acagttagaccaggggttatgaagaaaaatgaacctgatgaaa |
| | ctaaagaagctgtaattaaccgtttcaaggtagaatttaatga |
| | tgctgataaattagttcaagttgtacaagtaataaaagaagct |
| | aaaaaacaagttaaaatagaagatgctaagatattagtttctg |
| | ctggacgtggaatgggtggaaaagaaaacttagacatacttta |
| | tgaattagctgaaattataggtggagaagtttctggttctcgt |
| | gccactatagatgcaggttggttagataaagcaagacaagttg |
| | gtcaaactggtaaaactgtaagaccagacctttatatagcatg |
| | tggtatatctggagcaatacaacatatagctggtatggaagat |
| | gctgagtttatagttgctataaataaaaatccagaagctccaa |
| | tatttaaatatgctgatgttggtatagttggagatgttcataa |
| | agtgcttccagaacttatcagtcagttaagtgttgcaaaagaa |
| | aaaggtgaagttttagctaactaataagaaggagatatacata |
| | tgagagaagtagtaattgccagtgcagctagaacagcagtagg |
| | aagttttggaggagcatttaaatcagtttcagcggtagagtta |
| | ggggtaacagcagctaaagaagctataaaaagagctaacataa |
| | ctccagatatgatagatgaatctcttttagggggagtacttac |
| | agcaggtcttggacaaaatatagcaagacaaatagcattagga |
| | gcaggaataccagtagaaaaaccagctatgactataaatatag |
| | tttgtggttctggattaagatctgtttcaatggcatctcaact |
| | tatagcattaggtgatgctgatataatgttagttggtggagct |
| | gaaaacatgagtatgtctccttatttagtaccaagtgcgagat |
| | atggtgcaagaatgggtgatgctgcttttgttgattcaatgat |
| | aaaagatggattatcagacatatttaataactatcacatgggt |
| | attactgctgaaaacatagcagagcaatggaatataactagag |
| | aagaacaagatgaattagctcttgcaagtcaaaataaagctga |
| | aaaagctcaagctgaaggaaaatttgatgaagaaatagttcct |
| | gttgttataaaaggaagaaaaggtgacactgtagtagataaag |
| | atgaatatattaagcctggcactacaatggagaaacttgctaa |
| | gttaagacctgcatttaaaaaagatggaacagttactgctggt |
| | aatgcatcaggaataaatgatggtgctgctatgttagtagtaa |
| | tggctaaagaaaaagctgaagaactaggaatagagcctcttgc |
| | aactatagtttcttatggaacagctggtgttgaccctaaaata |
| | atgggatatggaccagttccagcaactaaaaaagctttagaag |
| | ctgctaatatgactattgaagatatagatttagttgaagctaa |
| | tgaggcatttgctgcccaatctgtagctgtaataagagactta |
| | aatatagatatgaataaagttaatgttaatggtggagcaatag |
| | ctataggacatccaataggatgctcaggagcaagaatacttac |
| | tacacttttatatgaaatgaagagaagagatgctaaaactggt |
| | cttgctacactttgtataggcggtggaatgggaactactttaa |
| | tagttaagagatagtaagaaggagatatacatatgaaattagc |
| | tgtaataggtagtggaactatgggaagtggtattgtacaaact |
| | tttgcaagttgtggacatgatgtatgtttaaagagtagaactc |
| | aaggtgctatagataaatgtttagctttattagataaaaattt |
| | aactaagttagttactaagggaaaaatggatgaagctacaaaa |
| | gcagaaatattaagtcatgttagttcaactactaattatgaag |
| | atttaaaagatatggatttaataatagaagcatctgtagaaga |
| | catgaatataaagaaagatgttttcaagttactagatgaatta |
| | tgtaaagaagatactatcttggcaacaaatacttcatcattat |
| | ctataacagaaatagcttcttctactaagcgcccagataaagt |
| | tataggaatgcatttctttaatccagttcctatgatgaaatta |
| | gttgaagttataagtggtcagttaacatcaaaagttacttttg |
| | atacagtatttgaattatctaagagtatcaataaagtaccagt |
| | agatgtatctgaatctcctggatttgtagtaaatagaatactt |
| | atacctatgataaatgaagctgttggtatatatgcagatggtg |
| | ttgcaagtaaagaagaaatagatgaagctatgaaattaggagc |
| | aaaccatccaatgggaccactagcattaggtgatttaatcgga |
| | ttagatgttgttttagctataatgaacgttttatatactgaat |
| | ttggagatactaaatatagacctcatccacttttagctaaaat |
| | ggttagagctaatcaattaggaagaaaaactaagataggattc |
| | tatgattataataaataataagaaggagatatacatatgagta |
| | caagtgatgttaaagtttatgagaatgtagctgttgaagtaga |
| | tggaaatatatgtacagtgaaaatgaatagacctaaagccctt |
| | aatgcaataaattcaaagactttagaagaactttatgaagtat |
| | ttgtagatattaataatgatgaaactattgatgttgtaatatt |
| | gacaggggaaggaaaggcatttgtagctggagcagatattgca |
| | tacatgaaagatttagatgctgtagctgctaaagattttagta |
| | tcttaggagcaaaagcttttggagaaatagaaaatagtaaaaa |
| | agtagtgatagctgctgtaaacggatttgctttaggtggagga |
| | tgtgaacttgcaatggcatgtgatataagaattgcatctgcta |
| | aagctaaatttggtcagccagaagtaactcttggaataactcc |
| | aggatatggaggaactcaaaggcttacaagattggttggaatg |
| | gcaaaagcaaaagaattaatctttacaggtcaagttataaaag |
| | ctgatgaagctgaaaaaatagggctagtaaatagagtcgttga |
| | gccagacattttaatagaagaagttgagaaattagctaagata |
| | atagctaaaaatgctcagcttgcagttagatactctaaagaag |
| | caatacaacttggtgctcaaactgatataaatactggaataga |
| | tatagaatctaatttatttggtctttgtttttcaactaaagac |
| | caaaaagaaggaatgtcagctttcgttgaaaagagagaagcta |
| | actttataaaagggtaataagaaggagatatacatatgagaag |
| | ttttgaagaagtaattaagtttgcaaaagaaagaggacctaaa |
| | actatatcagtagcatgttgccaagataaagaagttttaatgg |
| | cagttgaaatggctagaaaagaaaaaatagcaaatgccatttt |
| | agtaggagatatagaaaagactaaagaaattgcaaaaagcata |
| | gacatggatatcgaaaattatgaactgatagatataaaagatt |
| | tagcagaagcatctctaaaatctgttgaattagtttcacaagg |
| | aaaagccgacatggtaatgaaaggcttagtagacacatcaata |
| | atactaaaagcagttttaaataaagaagtaggtcttagaactg |
| | gaaatgtattaagtcacgtagcagtatttgatgtagagggata |
| | tgatagattatttttcgtaactgacgcagctatgaacttagct |
| | cctgatacaaatactaaaaagcaaatcatagaaaatgcttgca |
| | cagtagcacattcattagatataagtgaaccaaaagttgctgc |
| | aatatgcgcaaaagaaaaagtaaatccaaaaatgaaagataca |
| | gttgaagctaaagaactagaagaaatgtatgaaagaggagaaa |
| | tcaaaggttgtatggttggtgggccttttgcaattgataatgc |
| | agtatctttagaagcagctaaacataaaggtataaatcatcct |
| | gtagcaggacgagctgatatattattagccccagatattgaag |
| | gtggtaacatattatataaagctttggtattcttctcaaaatc |
| | aaaaaatgcaggagttatagttggggctaaagcaccaataata |
| | ttaacttctagagcagacagtgaagaaactaaactaaactcaa |
| | tagctttaggtgttttaatggcagcaaaggcataataagaagg |
| | agatatacatatgagcaaaatatttaaaatcttaacaataaat |
| | cctggttcgacatcaactaaaatagctgtatttgataatgagg |
| | atttagtatttgaaaaaactttaagacattcttcagaagaaat |
| | aggaaaatatgagaaggtgtctgaccaatttgaatttcgtaaa |
| | caagtaatagaagaagctctaaaagaaggtggagtaaaaacat |
| | ctgaattagatgctgtagtaggtagaggaggacttcttaaacc |
| | tataaaaggtggtacttattcagtaagtgctgctatgattgaa |
| | gatttaaaagtgggagttttaggagaacacgcttcaaacctag |
| | gtggaataatagcaaaacaaataggtgaagaagtaaatgttcc |
| | ttcatacatagtagaccctgttgttgtagatgaattagaagat |
| | gttgctagaatttctggtatgcctgaaataagtagagcaagtg |
| | tagtacatgctttaaatcaaaaggcaatagcaagaagatatgc |
| | tagagaaataaacaagaaatatgaagatataaatcttatagtt |
| | gcacacatgggtggaggagtttctgttggagctcataaaaatg |
| | gtaaaatagtagatgttgcaaacgcattagatggagaaggacc |
| | tttctctccagaaagaagtggtggactaccagtaggtgcatta |
| | gtaaaaatgtgctttagtggaaaatatactcaagatgaaatta |
| | aaaagaaaataaaaggtaatggcggactagttgcatacttaaa |
| | cactaatgatgctagagaagttgaagaaagaattgaagctggt |
| | gatgaaaaagctaaattagtatatgaagctatggcatatcaaa |
| | tctctaaagaaataggagctagtgctgcagttcttaagggaga |
| | tgtaaaagcaatattattaactggtggaatcgcatattcaaaa |
| | atgtttacagaaatgattgcagatagagttaaatttatagcag |
| | atgtaaaagtttatccaggtgaagatgaaatgattgcattagc |
| | tcaaggtggacttagagttttaactggtgaagaagaggctcaa |
| | gtttatgataactaataa |

TABLE 35
Nucleotide sequences of pLogic046-nsrR-norB-butyrate construct

| | Nucleotide sequences of pLogic046-nsrR-norB-butyrate construct |
|---|---|
| Description | (SEQ ID NO: 222) |
| Nucleic acid | ttattatcgcaccgcaatcgggattttcgattcataaagcaggtc |
| sequence of an | gtaggtcggcttgttgagcaggtcttgcagcgtgaaaccgtccag |
| exemplary RNS- | atacgtgaaaaacgacttcattgcaccgccgagtatgcccgtcag |
| regulated | ccggcaggacggcgtaatcaggcattcgttgttcgggcccataca |
| construct | ctcgaccagctgcatcggttcgaggtggcggacgaccgcgccgat |
| comprising a | attgatgcgttcgggcggcgcggccagcctcagcccgccgccttt |
| gene encoding | cccgcgtacgctgtgcaagaacccgcctttgaccagcgcggtaac |
| nsrR, a | cactttcatcaaatggcttttggaaatgccgtaggtcgaggcgat |
| regulatory | ggtggcgatattgaccagcgcgtcgtcgttgacggcggtgtagat |
| region of norB, | gaggacgcgcagcccgtagtcggtatgttgggtcagatacataca |
| and a | acctccttagtacatgcaaaattatttctagagcaacatacgagc |
| butyrogenic | cggaagcataaagtgtaaagcctggggtgcctaatgagttgagtt |
| gene cassette | gaggaattataacaggaagaaatattcctcatacgcttgtaattc |
| (pLogic046- | [chemical structure] |
| nsrR-norB- | [chemical structure] |
| butyrate | actttaagaaggagatatacatatgatcgtaaaacctatggtacg |
| construct; SEQ. | caacaatatctgcctgaacgcccatcctcagggctgcaagaaggg |
| ID NO: 80). | agtggaagatcagattgaatataccaagaaacgcattaccgcaga |
| | agtcaaagctggcgcaaaagctccaaaaaacgttctggtgcttgg |
| | ctgctcaaatggttacggcctggcgagccgcattactgctgcgtt |
| | cggatacggggctgcgaccatcggcgtgtcctttgaaaaagcggg |
| | ttcagaaaccaaatatggtacaccgggatggtacaataatttggc |
| | atttgatgaagcggcaaaacgcgagggtctttatagcgtgacgat |
| | cgacggcgatgcgttttcagacgagatcaaggcccaggtaattga |
| | ggaagccaaaaaaaaaggtatcaaatttgatctgatcgtatacag |
| | cttggccagcccagtacgtactgatcctgatacaggtatcatgca |
| | caaaagcgttttgaaaccctttggaaaaacgttcacaggcaaaac |
| | agtagatccgtttactggcgagctgaaggaaatctccgcggaacc |
| | agcaaatgacgaggaagcagccgccactgttaaagttatgggggg |
| | tgaagattgggaacgttggattaagcagctgtcgaaggaaggcct |
| | cttagaagaaggctgtattaccttggcctatagttatattggccc |
| | tgaagctacccaagctttgtaccgtaaaggcacaatcggcaaggc |
| | caaagaacacctggaggccacagcacaccgtctcaacaaagagaa |
| | cccgtcaatccgtgccttcgtgagcgtgaataaaggcctggtaac |
| | ccgcgcaagcgccgtaatcccggtaatccctctgtatctcgccag |
| | cttgttcaaagtaatgaaagagaagggcaatcatgaaggttgtat |
| | tgaacagatcacgcgtctgtacgccgagcgcctgtaccgtaaaga |
| | tggtacaattccagttgatgaggaaaatcgcattcgcattgatga |
| | ttgggagttagaagaagacgtccagaaagcggtatccgcgttgat |
| | ggagaaagtcacgggtgaaaacgcagaatctctcactgacttagc |
| | ggggtaccgccatgatttcttagctagtaacggctttgatgtaga |
| | aggtattaattatgaagcggaagttgaacgcttcgaccgtatctg |
| | ataagaaggagatatacatatgagagaagtagtaattgccagtgc |
| | agctagaacagcagtaggaagttttggaggagcatttaaatcagt |
| | ttcagcggtagagttaggggtaacagcagctaaagaagctataaa |
| | aagagctaacataactccagatatgatagatgaatctcttttagg |
| | gggagtacttacagcaggtcttggacaaaatatagcaagacaaat |
| | agcattaggagcaggaataccagtagaaaaaccagctatgactat |
| | aaatatagtttgtggttctggattaagatctgtttcaatggcatc |
| | tcaacttatagcattaggtgatgctgatataatgttagttggtgg |
| | agctgaaaacatgagtatgtctccttatttagtaccaagtgcgag |
| | atatggtgcaagaatgggtgatgctgcttttgttgattcaatgat |
| | aaaagatggattatcagacatatttaataactatcacatgggtat |
| | tactgctgaaaacatagcagagcaatggaatataactagagaaga |
| | acaagatgaattagctcttgcaagtcaaaataaagctgaaaaagc |
| | tcaagctgaaggaaaatttgatgaagaaatagttcctgttgttat |
| | aaaaggaagaaaaggtgacactgtagtagataaagatgaatatat |
| | taagcctggcactacaatggagaaacttgctaagttaagacctgc |
| | atttaaaaaagatggaacagttactgctggtaatgcatcaggaat |
| | aaatgatggtgctgctatgttagtagtaatggctaaagaaaaagc |
| | tgaagaactaggaatagagcctcttgcaactatagtttcttatgg |
| | aacagctggtgttgaccctaaaataatgggatatggaccagttcc |
| | agcaactaaaaaagctttagaagctgctaatatgactattgaaga |
| | tatagatttagttgaagctaatgaggcatttgctgcccaatctgt |
| | agctgtaataagagacttaaatatagatatgaataaagttaatgt |
| | taatggtggagcaatagctataggacatccaataggatgctcagg |
| | agcaagaatacttactacacttttatatgaaatgaagagaagaga |
| | tgctaaaactggtcttgctacactttgtataggcggtggaatggg |
| | aactactttaatagttaagagatagtaagaaggagatatacatat |
| | gaaattagctgtaataggtagtggaactatgggaagtggtattgt |
| | acaaacttttgcaagttgtggacatgatgtatgtttaaagagtag |
| | aactcaaggtgctatagataaatgtttagctttattagataaaaa |
| | tttaactaagttagttactaagggaaaaatggatgaagctacaaa |
| | agcagaaatattaagtcatgttagttcaactactaattatgaaga |
| | tttaaaagatatggatttaataatagaagcatctgtagaagacat |
| | gaatataaagaaagatgttttcaagttactagatgaattatgtaa |
| | agaagatactatcttggcaacaaatacttcatcattatctataac |
| | agaaatagcttcttctactaagcgcccagataaagttataggaat |
| | gcatttctttaatccagttcctatgatgaaattagttgaagttat |
| | aagtggtcagttaacatcaaaagttacttttgatacagtatttga |
| | attatctaagagtatcaataaagtaccagtagatgtatctgaatc |
| | tcctggatttgtagtaaatagaatacttatacctatgataaatga |
| | agctgttggtatatatgcagatggtgttgcaagtaaagaagaaat |
| | agatgaagctatgaaattaggagcaaaccatccaatgggaccact |
| | agcattaggtgatttaatcggattagatgttgttttagctataat |
| | gaacgttttatatactgaatttggagatactaaatatagacctca |
| | tccacttttagctaaaatggttagagctaatcaattaggaagaaa |
| | aactaagataggattctatgattataataaataataagaaggaga |
| | tatacatatgagtacaagtgatgttaaagtttatgagaatgtagc |
| | tgttgaagtagatggaaatatatgtacagtgaaaatgaatagacc |
| | taaagcccttaatgcaataaattcaaagactttagaagaacttta |
| | tgaagtatttgtagatattaataatgatgaaactattgatgttgt |
| | aatattgacaggggaaggaaaggcatttgtagctggagcagatat |
| | tgcatacatgaaagatttagatgctgtagctgctaaagattttag |
| | tatcttaggagcaaaagcttttggagaaatagaaaatagtaaaaa |
| | agtagtgatagctgctgtaaacggatttgctttaggtggaggatg |
| | tgaacttgcaatggcatgtgatataagaattgcatctgctaaagc |
| | taaatttggtcagccagaagtaactcttggaataactccaggata |
| | tggaggaactcaaaggcttacaagattggttggaatggcaaaagc |
| | aaaagaattaatctttacaggtcaagttataaaagctgatgaagc |
| | tgaaaaaatagggctagtaaatagagtcgttgagccagacatttt |
| | aatagaagaagttgagaaattagctaagataatagctaaaaatgc |
| | tcagcttgcagttagatactctaaagaagcaatacaacttggtgc |
| | tcaaactgatataaatactggaatagatatagaatctaatttatt |
| | tggtctttgtttttcaactaaagaccaaaaagaaggaatgtcagc |
| | tttcgttgaaaagagagaagctaactttataaaagggtaataaga |
| | aggagatatacatatgagaagttttgaagaagtaattaagtttgc |
| | aaaagaaagaggacctaaaactatatcagtagcatgttgccaaga |
| | taaagaagttttaatggcagttgaaatggctagaaaagaaaaaat |
| | agcaaatgccattttagtaggagatatagaaaagactaaagaaat |
| | tgcaaaaagcatagacatggatatcgaaaattatgaactgataga |
| | tataaaagatttagcagaagcatctctaaaatctgttgaattagt |
| | ttcacaaggaaaagccgacatggtaatgaaaggcttagtagacac |
| | atcaataatactaaaagcagttttaaataaagaagtaggtcttag |
| | aactggaaatgtattaagtcacgtagcagtatttgatgtagaggg |
| | atatgatagattatttttcgtaactgacgcagctatgaacttagc |
| | tcctgatacaaatactaaaaagcaaatcatagaaaatgcttgcac |
| | agtagcacattcattagatataagtgaaccaaaagttgctgcaat |
| | atgcgcaaaagaaaaagtaaatccaaaaatgaaagatacagttga |
| | agctaaagaactagaagaaatgtatgaaagaggagaaatcaaagg |
| | ttgtatggttggtgggccttttgcaattgataatgcagtatcttt |
| | agaagcagctaaacataaaggtataaatcatcctgtagcaggacg |
| | agctgatatattattagccccagatattgaaggtggtaacatatt |
| | atataaagctttggtattcttctcaaaatcaaaaaatgcaggagt |
| | tatagttggggctaaagcaccaataatattaacttctagagcaga |
| | cagtgaagaaactaaactaaactcaatagctttaggtgttttaat |
| | ggcagcaaaggcataataagaaggagatatacatatgagcaaaat |
| | atttaaaatcttaacaataaatcctggttcgacatcaactaaaat |
| | agctgtatttgataatgaggatttagtatttgaaaaaactttaag |
| | acattcttcagaagaaataggaaaatatgagaaggtgtctgacca |
| | atttgaatttcgtaaacaagtaatagaagaagctctaaaagaagg |
| | tggagtaaaaacatctgaattagatgctgtagtaggtagaggagg |
| | acttcttaaacctataaaaggtggtacttattcagtaagtgctgc |
| | tatgattgaagatttaaaagtgggagttttaggagaacacgcttc |
| | aaacctaggtggaataatagcaaaacaaataggtgaagaagtaaa |
| | tgttccttcatacatagtagaccctgttgttgtagatgaattaga |
| | agatgttgctagaatttctggtatgcctgaaataagtagagcaag |
| | tgtagtacatgctttaaatcaaaaggcaatagcaagaagatatgc |
| | tagagaaataaacaagaaatatgaagatataaatcttatagttgc |
| | acacatgggtggaggagtttctgttggagctcataaaaatggtaa |
| | aatagtagatgttgcaaacgcattagatggagaaggacctttctc |
| | tccagaaagaagtggtggactaccagtaggtgcattagtaaaaat |
| | gtgctttagtggaaaatatactcaagatgaaattaaaaagaaaat |
| | aaaaggtaatggcggactagttgcatacttaaacactaatgatgc |
| | tagagaagttgaagaaagaattgaagctggtgatgaaaaagctaa |
| | attagtatatgaagctatggcatatcaaatctctaaagaaatagg |
| | agctagtgctgcagttcttaagggagatgtaaaagcaatattatt |
| | aactggtggaatcgcatattcaaaaatgtttacagaaatgattgc |
| | agatagagttaaatttatagcagatgtaaaagtttatccaggtga |
| | agatgaaatgattgcattagctcaaggtggacttagagttttaac |
| | tggtgaagaagaggctcaagtttatgataactaataa |

[1029] The gene products of the bcd2-etfA3-etfB3 genes form a complex that converts crotonyl-CoA to butyryl-CoA and may exhibit dependence on oxygen as a co-oxidant. Because the recombinant bacteria of the invention are designed to produce butyrate in an oxygen-limited environment (e.g. the mammalian gut), that dependence on oxygen could have a negative effect of butyrate production in the gut. It has been shown that a single gene from Treponema denticola, trans-2-enoynl-CoA reductase (ter), can functionally replace this three gene complex in an oxygen-independent manner. Therefore, a second butyrate gene cassette in which the ter gene replaces the bcd2-etfA3-etfB3 genes of the first butyrate cassette is synthesized (Genewiz, Cambridge, Mass.). The ter gene is codon-optimized for E. coli codon usage using Integrated DNA Technologies online codon optimization tool (https://www.idtdna.com/CodonOpt). The second butyrate gene cassette, as well as transcriptional and translational elements, is synthesized (Gen9, Cambridge, Mass.) and cloned into vector pBR322. The second butyrate gene cassette is placed under control of a FNR regulatory region as described above. In certain constructs, the butyrate gene cassette is placed under the control of an RNS-responsive regulatory region, e.g., norB, and the bacteria further comprises a gene encoding a corresponding RNS-responsive transcription factor, e.g., nsrR (see, e.g., Table 20). In certain constructs, the butyrate gene cassette is placed under the control of an ROS-responsive regulatory region, e.g., oxyS, and the bacteria further comprises a gene encoding a corresponding ROS-responsive transcription factor, e.g., oxyR (see, e.g., Table 21 and Table 22).

TABLE 36
ROS regulated constructs, OxyR construct, Tet-regulated constructs

| Description | Sequence |
|---|---|
| Nucleotide | ctcgagttcattatccatcctccatcgccacgatagttcatggcgataggtagaatagcaatgaacgattat |
| sequences of | ccctatcaagcattctgactgataattgctcacacgaattcattaaagaggagaaaggtaccatggatttaa |
| pLogic031- | attctaaaaaatatcagatgcttaaagagctatatgtaagcttcgctgaaaatgaagttaaacctttagcaac |
| oxyS-butyrate | agaacttgatgaagaagaaagatttccttatgaaacagtggaaaaaatggcaaaagcaggaatgatggg |
| construct (SEQ | tataccatatccaaaagaatatggtggagaaggtggagacactgtaggatatataatggcagttgaagaat |
| ID NO: 223) | tgtctagagtttgtggtactacaggagttatattatcagctcatacatctcttggctcatggcctatatatcaat |
| | atggtaatgaagaacaaaaacaaaaattcttaagaccactagcaagtggagaaaaattaggagcatttgg |
| | tcttactgagcctaatgctggtacagatgcgtctggccaacaaacaactgctgttttagacggggatgaat |
| | acatacttaatggctcaaaaatatttataacaaacgcaatagctggtgacatatatgtagtaatggcaatgac |
| | tgataaatctaaggggaacaaaggaatatcagcatttatagttgaaaaaggaactcctgggtttagctttgg |
| | agttaaagaaaagaaaatgggtataagaggttcagctacgagtgaattaatatttgaggattgcagaatac |
| | ctaaagaaaatttacttggaaaagaaggtcaaggatttaagatagcaatgtctactcttgatggtggtagaa |
| | ttggtatagctgcacaagctttaggtttagcacaaggtgctcttgatgaaactgttaaatatgtaaaagaaag |
| | agtacaatttggtagaccattatcaaaattccaaaatacacaattccaattagctgatatggaagttaaggta |
| | caagcggctagacaccttgtatatcaagcagctataaataaagacttaggaaaaccttatggagtagaag |
| | cagcaatggcaaaattatttgcagctgaaacagctatggaagttactacaaaagctgtacaacttcatgga |
| | ggatatggatacactcgtgactatccagtagaaagaatgatgagagatgctaagataactgaaatatatga |
| | aggaactagtgaagttcaaagaatggttatttcaggaaaactattaaaatagtaagaaggagatatacatat |
| | ggaggaaggatttatgaatatagtcgtttgtataaaacaagttccagatacaacagaagttaaactagatcc |
| | taatacaggtactttaattagagatggagtaccaagtataataaaccctgatgataaagcaggtttagaaga |
| | agctataaaattaaaagaagaaatgggtgctcatgtaactgttataacaatgggacctcctcaagcagatat |
| | ggctttaaaagaagctttagcaatgggtgcagatagaggtatattattaacagatagagcatttgcgggtg |
| | ctgatacttgggcaacttcatcagcattagcaggagcattaaaaaatatagattttgatattataatagctgg |
| | aagacaggcgatagatggagatactgcacaagttggacctcaaatagctgaacatttaaatcttccatcaa |
| | taacatatgctgaagaaataaaaactgaaggtgaatatgtattagtaaaaagacaatttgaagattgttgcc |
| | atgacttaaaagttaaaatgccatgccttataacaactcttaaagatatgaacacaccaagatacatgaaag |
| | ttggaagaatatatgatgctttcgaaaatgatgtagtagaaacatggactgtaaaagatatagaagttgacc |
| | cttctaatttaggtcttaaaggttctccaactagtgtatttaaatcatttacaaaatcagttaaaccagctggta |
| | caatatacaatgaagatgcgaaaacatcagctggaattatcatagataaattaaaagagaagtatatcatat |
| | aataagaaggagatatacatatgggtaacgttttagtagtaatagaacaaagagaaaatgtaattcaaact |
| | gtttctttagaattactaggaaaggctacagaaatagcaaaagattatgatacaaaagtttctgcattactttt |
| | aggtagtaaggtagaaggtttaatagatacattagcacactatggtgcagatgaggtaatagtagtagatg |
| | atgaagctttagcagtgtatacaactgaaccatatacaaaagcagcttatgaagcaataaaagcagctgac |
| | cctatagttgtattatttggtgcaacttcaataggtagagatttagcgcctagagtttctgctagaatacatac |
| | aggtcttactgctgactgtacaggtcttgcagtagctgaagatacaaaattattattaatgacaagacctgcc |
| | tttggtggaaatataatggcaacaatagtttgtaaagatttcagacctcaaatgtctacagttagaccaggg |
| | gttatgaagaaaaatgaacctgatgaaactaaagaagctgtaattaaccgtttcaaggtagaatttaatgat |
| | gctgataaattagttcaagttgtacaagtaataaaagaagctaaaaaacaagttaaaatagaagatgctaa |
| | gatattagtttctgctggacgtggaatgggtggaaaagaaaacttagacatactttatgaattagctgaaatt |
| | ataggtggagaagtttctggttctcgtgccactatagatgcaggttggttagataaagcaagacaagttggt |
| | caaactggtaaaactgtaagaccagacctttatatagcatgtggtatatctggagcaatacaacatatagct |
| | ggtatggaagatgctgagtttatagttgctataaataaaaatccagaagctccaatatttaaatatgctgatgt |
| | tggtatagttggagatgttcataaagtgcttccagaacttatcagtcagttaagtgttgcaaaagaaaaaggt |
| | gaagttttagctaactaataagaaggagatatacatatgagagaagtagtaattgccagtgcagctagaac |
| | agcagtaggaagttttggaggagcatttaaatcagtttcagcggtagagttaggggtaacagcagctaaa |
| | gaagctataaaaagagctaacataactccagatatgatagatgaatctcttttagggggagtacttacagc |
| | aggtcttggacaaaatatagcaagacaaatagcattaggagcaggaataccagtagaaaaaccagctat |
| | gactataaatatagtttgtggttctggattaagatctgtttcaatggcatctcaacttatagcattaggtgatgc |
| | tgatataatgttagttggtggagctgaaaacatgagtatgtctccttatttagtaccaagtgcgagatatggt |
| | gcaagaatgggtgatgctgcttttgttgattcaatgataaaagatggattatcagacatatttaataactatca |
| | catgggtattactgctgaaaacatagcagagcaatggaatataactagagaagaacaagatgaattagct |
| | cttgcaagtcaaaataaagctgaaaaagctcaagctgaaggaaaatttgatgaagaaatagttcctgttgtt |
| | ataaaaggaagaaaaggtgacactgtagtagataaagatgaatatattaagcctggcactacaatggaga |
| | aacttgctaagttaagacctgcatttaaaaaagatggaacagttactgctggtaatgcatcaggaataaatg |
| | atggtgctgctatgttagtagtaatggctaaagaaaaagctgaagaactaggaatagagcctcttgcaact |
| | atagtttcttatggaacagctggtgttgaccctaaaataatgggatatggaccagttccagcaactaaaaaa |
| | gctttagaagctgctaatatgactattgaagatatagatttagttgaagctaatgaggcatttgctgcccaatc |
| | tgtagctgtaataagagacttaaatatagatatgaataaagttaatgttaatggtggagcaatagctatagga |
| | catccaataggatgctcaggagcaagaatacttactacacttttatatgaaatgaagagaagagatgctaa |
| | aactggtcttgctacactttgtataggcggtggaatgggaactactttaatagttaagagatagtaagaagg |
| | agatatacatatgaaattagctgtaataggtagtggaactatgggaagtggtattgtacaaacttttgcaagt |
| | tgtggacatgatgtatgtttaaagagtagaactcaaggtgctatagataaatgtttagctttattagataaaaa |
| | tttaactaagttagttactaagggaaaaatggatgaagctacaaaagcagaaatattaagtcatgttagttca |
| | actactaattatgaagatttaaaagatatggatttaataatagaagcatctgtagaagacatgaatataaaga |
| | aagatgttttcaagttactagatgaattatgtaaagaagatactatcttggcaacaaatacttcatcattatcta |
| | taacagaaatagcttcttctactaagcgcccagataaagttataggaatgcatttctttaatccagttcctatg |
| | atgaaattagttgaagttataagtggtcagttaacatcaaaagttacttttgatacagtatttgaattatctaag |
| | agtatcaataaagtaccagtagatgtatctgaatctcctggatttgtagtaaatagaatacttatacctatgat |
| | aaatgaagctgttggtatatatgcagatggtgttgcaagtaaagaagaaatagatgaagctatgaaattag |
| | gagcaaaccatccaatgggaccactagcattaggtgatttaatcggattagatgttgttttagctataatgaa |
| | cgttttatatactgaatttggagatactaaatatagacctcatccacttttagctaaaatggttagagctaatca |
| | attaggaagaaaaactaagataggattctatgattataataaataataagaaggagatatacatatgagtac |
| | aagtgatgttaaagtttatgagaatgtagctgttgaagtagatggaaatatatgtacagtgaaaatgaatag |
| | acctaaagcccttaatgcaataaattcaaagactttagaagaactttatgaagtatttgtagatattaataatg |
| | atgaaactattgatgttgtaatattgacaggggaaggaaaggcatttgtagctggagcagatattgcataca |
| | tgaaagatttagatgctgtagctgctaaagattttagtatcttaggagcaaaagcttttggagaaatagaaaa |
| | tagtaaaaaagtagtgatagctgctgtaaacggatttgctttaggtggaggatgtgaacttgcaatggcatg |
| | tgatataagaattgcatctgctaaagctaaatttggtcagccagaagtaactcttggaataactccaggatat |
| | ggaggaactcaaaggcttacaagattggttggaatggcaaaagcaaaagaattaatctttacaggtcaag |
| | ttataaaagctgatgaagctgaaaaaatagggctagtaaatagagtcgttgagccagacattttaatagaa |
| | gaagttgagaaattagctaagataatagctaaaaatgctcagcttgcagttagatactctaaagaagcaata |
| | caacttggtgctcaaactgatataaatactggaatagatatagaatctaatttatttggtctttgtttttcaacta |
| | aagaccaaaaagaaggaatgtcagctttcgttgaaaagagagaagctaactttataaaagggtaataaga |
| | aggagatatacatatgagaagttttgaagaagtaattaagtttgcaaaagaaagaggacctaaaactatat |
| | cagtagcatgttgccaagataaagaagttttaatggcagttgaaatggctagaaaagaaaaaatagcaaat |
| | gccattttagtaggagatatagaaaagactaaagaaattgcaaaaagcatagacatggatatcgaaaatta |
| | tgaactgatagatataaaagatttagcagaagcatctctaaaatctgttgaattagtttcacaaggaaaagc |
| | cgacatggtaatgaaaggcttagtagacacatcaataatactaaaagcagttttaaataaagaagtaggtct |
| | tagaactggaaatgtattaagtcacgtagcagtatttgatgtagagggatatgatagattatttttcgtaactg |
| | acgcagctatgaacttagctcctgatacaaatactaaaaagcaaatcatagaaaatgcttgcacagtagca |
| | cattcattagatataagtgaaccaaaagttgctgcaatatgcgcaaaagaaaaagtaaatccaaaaatgaa |
| | agatacagttgaagctaaagaactagaagaaatgtatgaaagaggagaaatcaaaggttgtatggttggt |
| | gggccttttgcaattgataatgcagtatctttagaagcagctaaacataaaggtataaatcatcctgtagcag |
| | gacgagctgatatattattagccccagatattgaaggtggtaacatattatataaagctttggtattcttctcaa |
| | aatcaaaaaatgcaggagttatagttggggctaaagcaccaataatattaacttctagagcagacagtgaa |
| | gaaactaaactaaactcaatagctttaggtgttttaatggcagcaaaggcataataagaaggagatatacat |
| | atgagcaaaatatttaaaatcttaacaataaatcctggttcgacatcaactaaaatagctgtatttgataatga |
| | ggatttagtatttgaaaaaactttaagacattcttcagaagaaataggaaaatatgagaaggtgtctgacca |
| | atttgaatttcgtaaacaagtaatagaagaagctctaaaagaaggtggagtaaaaacatctgaattagatg |
| | ctgtagtaggtagaggaggacttcttaaacctataaaaggtggtacttattcagtaagtgctgctatgattga |
| | agatttaaaagtgggagttttaggagaacacgcttcaaacctaggtggaataatagcaaaacaaataggt |
| | gaagaagtaaatgttccttcatacatagtagaccctgttgttgtagatgaattagaagatgttgctagaatttc |
| | tggtatgcctgaaataagtagagcaagtgtagtacatgctttaaatcaaaaggcaatagcaagaagatatg |
| | ctagagaaataaacaagaaatatgaagatataaatcttatagttgcacacatgggtggaggagtttctgttg |
| | gagctcataaaaatggtaaaatagtagatgttgcaaacgcattagatggagaaggacctttctctccagaa |
| | agaagtggtggactaccagtaggtgcattagtaaaaatgtgctttagtggaaaatatactcaagatgaaatt |
| | aaaaagaaaataaaaggtaatggcggactagttgcatacttaaacactaatgatgctagagaagttgaag |
| | aaagaattgaagctggtgatgaaaaagctaaattagtatatgaagctatggcatatcaaatctctaaagaaa |
| | taggagctagtgctgcagttcttaagggagatgtaaaagcaatattattaactggtggaatcgcatattcaa |
| | aaatgtttacagaaatgattgcagatagagttaaatttatagcagatgtaaaagtttatccaggtgaagatga |
| | aatgattgcattagctcaaggtggacttagagttttaactggtgaagaagaggctcaagtttatgataactaa |
| | taa |
| Nucleotide | ctcgagttcattatccatcctccatcgccacgatagttcatggcgataggtagaatagcaatgaacgattat |
| sequences of | ccctatcaagcattctgactgataattgctcacacgaattcattaaagaggagaaaggtaccatgatcgtaa |
| pLogic046- | aacctatggtacgcaacaatatctgcctgaacgcccatcctcagggctgcaagaagggagtggaagatc |
| oxyS-butyrate | agattgaatataccaagaaacgcattaccgcagaagtcaaagctggcgcaaaagctccaaaaaacgttc |
| construct (SEQ | tggtgcttggctgctcaaatggttacggcctggcgagccgcattactgctgcgttcggatacggggctgc |
| ID NO: 224) | gaccatcggcgtgtcctttgaaaaagcgggttcagaaaccaaatatggtacaccgggatggtacaataat |
| | ttggcatttgatgaagcggcaaaacgcgagggtctttatagcgtgacgatcgacggcgatgcgttttcag |
| | acgagatcaaggcccaggtaattgaggaagccaaaaaaaaaggtatcaaatttgatctgatcgtatacag |
| | cttggccagcccagtacgtactgatcctgatacaggtatcatgcacaaaagcgttttgaaaccctttggaa |
| | aaacgttcacaggcaaaacagtagatccgtttactggcgagctgaaggaaatctccgcggaaccagcaa |
| | atgacgaggaagcagccgccactgttaaagttatggggggtgaagattgggaacgttggattaagcagc |
| | tgtcgaaggaaggcctcttagaagaaggctgtattaccttggcctatagttatattggccctgaagctaccc |
| | aagctttgtaccgtaaaggcacaatcggcaaggccaaagaacacctggaggccacagcacaccgtctc |
| | aacaaagagaacccgtcaatccgtgccttcgtgagcgtgaataaaggcctggtaacccgcgcaagcgc |
| | cgtaatcccggtaatccctctgtatctcgccagcttgttcaaagtaatgaaagagaagggcaatcatgaag |
| | gttgtattgaacagatcacgcgtctgtacgccgagcgcctgtaccgtaaagatggtacaattccagttgat |
| | gaggaaaatcgcattcgcattgatgattgggagttagaagaagacgtccagaaagcggtatccgcgttg |
| | atggagaaagtcacgggtgaaaacgcagaatctctcactgacttagcggggtaccgccatgatttcttag |
| | ctagtaacggctttgatgtagaaggtattaattatgaagcggaagttgaacgcttcgaccgtatctgataag |
| | aaggagatatacatatgagagaagtagtaattgccagtgcagctagaacagcagtaggaagttttggag |
| | gagcatttaaatcagtttcagcggtagagttaggggtaacagcagctaaagaagctataaaaagagctaa |
| | cataactccagatatgatagatgaatctcttttagggggagtacttacagcaggtcttggacaaaatatagc |
| | aagacaaatagcattaggagcaggaataccagtagaaaaaccagctatgactataaatatagtttgtggtt |
| | ctggattaagatctgtttcaatggcatctcaacttatagcattaggtgatgctgatataatgttagttggtgga |
| | gctgaaaacatgagtatgtctccttatttagtaccaagtgcgagatatggtgcaagaatgggtgatgctgct |
| | tttgttgattcaatgataaaagatggattatcagacatatttaataactatcacatgggtattactgctgaaaac |
| | atagcagagcaatggaatataactagagaagaacaagatgaattagctcttgcaagtcaaaataaagctg |
| | aaaaagctcaagctgaaggaaaatttgatgaagaaatagttcctgttgttataaaaggaagaaaaggtga |
| | cactgtagtagataaagatgaatatattaagcctggcactacaatggagaaacttgctaagttaagacctg |
| | catttaaaaaagatggaacagttactgctggtaatgcatcaggaataaatgatggtgctgctatgttagtagt |
| | aatggctaaagaaaaagctgaagaactaggaatagagcctcttgcaactatagtttcttatggaacagctg |
| | gtgttgaccctaaaataatgggatatggaccagttccagcaactaaaaaagctttagaagctgctaatatg |
| | actattgaagatatagatttagttgaagctaatgaggcatttgctgcccaatctgtagctgtaataagagactt |
| | aaatatagatatgaataaagttaatgttaatggtggagcaatagctataggacatccaataggatgctcagg |
| | agcaagaatacttactacacttttatatgaaatgaagagaagagatgctaaaactggtcttgctacactttgt |
| | ataggcggtggaatgggaactactttaatagttaagagatagtaagaaggagatatacatatgaaattagc |
| | tgtaataggtagtggaactatgggaagtggtattgtacaaacttttgcaagttgtggacatgatgtatgtttaa |
| | agagtagaactcaaggtgctatagataaatgtttagctttattagataaaaatttaactaagttagttactaag |
| | ggaaaaatggatgaagctacaaaagcagaaatattaagtcatgttagttcaactactaattatgaagattta |
| | aaagatatggatttaataatagaagcatctgtagaagacatgaatataaagaaagatgttttcaagttactag |
| | atgaattatgtaaagaagatactatcttggcaacaaatacttcatcattatctataacagaaatagcttcttcta |
| | ctaagcgcccagataaagttataggaatgcatttctttaatccagttcctatgatgaaattagttgaagttata |
| | agtggtcagttaacatcaaaagttacttttgatacagtatttgaattatctaagagtatcaataaagtaccagt |
| | agatgtatctgaatctcctggatttgtagtaaatagaatacttatacctatgataaatgaagctgttggtatata |
| | tgcagatggtgttgcaagtaaagaagaaatagatgaagctatgaaattaggagcaaaccatccaatggg |
| | accactagcattaggtgatttaatcggattagatgttgttttagctataatgaacgttttatatactgaatttgga |
| | gatactaaatatagacctcatccacttttagctaaaatggttagagctaatcaattaggaagaaaaactaag |
| | ataggattctatgattataataaataataagaaggagatatacatatgagtacaagtgatgttaaagtttatga |
| | gaatgtagctgttgaagtagatggaaatatatgtacagtgaaaatgaatagacctaaagcccttaatgcaat |
| | aaattcaaagactttagaagaactttatgaagtatttgtagatattaataatgatgaaactattgatgttgtaata |
| | ttgacaggggaaggaaaggcatttgtagctggagcagatattgcatacatgaaagatttagatgctgtagc |
| | tgctaaagattttagtatcttaggagcaaaagcttttggagaaatagaaaatagtaaaaaagtagtgatagc |
| | tgctgtaaacggatttgctttaggtggaggatgtgaacttgcaatggcatgtgatataagaattgcatctgct |
| | aaagctaaatttggtcagccagaagtaactcttggaataactccaggatatggaggaactcaaaggcttac |
| | aagattggttggaatggcaaaagcaaaagaattaatctttacaggtcaagttataaaagctgatgaagctg |
| | aaaaaatagggctagtaaatagagtcgttgagccagacattttaatagaagaagttgagaaattagctaag |
| | ataatagctaaaaatgctcagcttgcagttagatactctaaagaagcaatacaacttggtgctcaaactgat |
| | ataaatactggaatagatatagaatctaatttatttggtctttgtttttcaactaaagaccaaaaagaaggaat |
| | gtcagctttcgttgaaaagagagaagctaactttataaaagggtaataagaaggagatatacatatgagaa |
| | gttttgaagaagtaattaagtttgcaaaagaaagaggacctaaaactatatcagtagcatgttgccaagata |
| | aagaagttttaatggcagttgaaatggctagaaaagaaaaaatagcaaatgccattttagtaggagatata |
| | gaaaagactaaagaaattgcaaaaagcatagacatggatatcgaaaattatgaactgatagatataaaag |
| | atttagcagaagcatctctaaaatctgttgaattagtttcacaaggaaaagccgacatggtaatgaaaggct |
| | tagtagacacatcaataatactaaaagcagttttaaataaagaagtaggtcttagaactggaaatgtattaa |
| | gtcacgtagcagtatttgatgtagagggatatgatagattatttttcgtaactgacgcagctatgaacttagct |
| | cctgatacaaatactaaaaagcaaatcatagaaaatgcttgcacagtagcacattcattagatataagtgaa |
| | ccaaaagttgctgcaatatgcgcaaaagaaaaagtaaatccaaaaatgaaagatacagttgaagctaaa |
| | gaactagaagaaatgtatgaaagaggagaaatcaaaggttgtatggttggtgggccttttgcaattgataa |
| | tgcagtatctttagaagcagctaaacataaaggtataaatcatcctgtagcaggacgagctgatatattatta |
| | gccccagatattgaaggtggtaacatattatataaagctttggtattcttctcaaaatcaaaaaatgcaggag |
| | ttatagttggggctaaagcaccaataatattaacttctagagcagacagtgaagaaactaaactaaactca |
| | atagctttaggtgttttaatggcagcaaaggcataataagaaggagatatacatatgagcaaaatatttaaa |
| | atcttaacaataaatcctggttcgacatcaactaaaatagctgtatttgataatgaggatttagtatttgaaaaa |
| | actttaagacattcttcagaagaaataggaaaatatgagaaggtgtctgaccaatttgaatttcgtaaacaa |
| | gtaatagaagaagctctaaaagaaggtggagtaaaaacatctgaattagatgctgtagtaggtagaggag |
| | gacttcttaaacctataaaaggtggtacttattcagtaagtgctgctatgattgaagatttaaaagtgggagtt |
| | ttaggagaacacgcttcaaacctaggtggaataatagcaaaacaaataggtgaagaagtaaatgttccttc |
| | atacatagtagaccctgttgttgtagatgaattagaagatgttgctagaatttctggtatgcctgaaataagta |
| | gagcaagtgtagtacatgctttaaatcaaaaggcaatagcaagaagatatgctagagaaataaacaagaa |
| | atatgaagatataaatcttatagttgcacacatgggtggaggagtttctgttggagctcataaaaatggtaaa |
| | atagtagatgttgcaaacgcattagatggagaaggacctttctctccagaaagaagtggtggactaccagt |
| | aggtgcattagtaaaaatgtgctttagtggaaaatatactcaagatgaaattaaaaagaaaataaaaggtaa |
| | tggcggactagttgcatacttaaacactaatgatgctagagaagttgaagaaagaattgaagctggtgatg |
| | aaaaagctaaattagtatatgaagctatggcatatcaaatctctaaagaaataggagctagtgctgcagttc |
| | ttaagggagatgtaaaagcaatattattaactggtggaatcgcatattcaaaaatgtttacagaaatgattgc |
| | agatagagttaaatttatagcagatgtaaaagtttatccaggtgaagatgaaatgattgcattagctcaaggt |
| | ggacttagagttttaactggtgaagaagaggctcaagtttatgataactaataa |
| Nucleotide | ctcgagatgctagcaattgtgagcggataacaattgacattgtgagcggataacaagatactgagcacat |
| sequences of | cagcaggacgcactgaccttaattaaaagaattcattaaagaggagaaaggtaccatgaatattcgtgatc |
| pZA22-oxyR | ttgagtacctggtggcattggctgaacaccgccattttcggcgtgcggcagattcctgccacgttagccag |
| construct (SEQ | ccgacgcttagcgggcaaattcgtaagctggaagatgagctgggcgtgatgttgctggagcggaccag |
| ID NO: 225) | ccgtaaagtgttgttcacccaggcgggaatgctgctggtggatcaggcgcgtaccgtgctgcgtgaggt |
| | gaaagtccttaaagagatggcaagccagcagggcgagacgatgtccggaccgctgcacattggtttgat |
| | tcccacagttggaccgtacctgctaccgcatattatccctatgctgcaccagacctttccaaagctggaaat |
| | gtatctgcatgaagcacagacccaccagttactggcgcaactggacagcggcaaactcgattgcgtgat |
| | cctcgcgctggtgaaagagagcgaagcattcattgaagtgccgttgtttgatgagccaatgttgctggcta |
| | tctatgaagatcacccgtgggcgaaccgcgaatgcgtaccgatggccgatctggcaggggaaaaactg |
| | ctgatgctggaagatggtcactgtttgcgcgatcaggcaatgggtttctgttttgaagccggggcggatga |
| | agatacacacttccgcgcgaccagcctggaaactctgcgcaacatggtggcggcaggtagcgggatca |
| | ctttactgccagcgctggctgtgccgccggagcgcaaacgcgatggggttgtttatctgccgtgcattaa |
| | gccggaaccacgccgcactattggcctggtttatcgtcctggctcaccgctgcgcagccgctatgagca |
| | gctggcagaggccatccgcgcaagaatggatggccatttcgataaagttttaaaacaggcggtttaagga |
| | tcccatggtacgcgtgctagaggcatcaaataaaacgaaaggctcagtcgaaagactgggcctttcgtttt |
| | atctgttgtttgtcggtgaacgctctcctgagtaggacaaatccgccgccctagacctaggggatatattcc |
| | gcttcctcgctcactgactcgctacgctcggtcgttcgactgcggcgagcggaaatggcttacgaacgg |
| | ggcggagatttcctggaagatgccaggaagatacttaacagggaagtgagagggccgcggcaaagcc |
| | gtttttccataggctccgcccccctgacaagcatcacgaaatctgacgctcaaatcagtggtggcgaaac |
| | ccgacaggactataaagataccaggcgtttccccctggcggctccctcgtgcgctctcctgttcctgccttt |
| | cggtttaccggtgtcattccgctgttatggccgcgtttgtctcattccacgcctgacactcagttccgggtag |
| | gcagttcgctccaagctggactgtatgcacgaaccccccgttcagtccgaccgctgcgccttatccggta |
| | actatcgtcttgagtccaacccggaaagacatgcaaaagcaccactggcagcagccactggtaattgatt |
| | tagaggagttagtcttgaagtcatgcgccggttaaggctaaactgaaaggacaagttttggtgactgcgct |
| | cctccaagccagttacctcggttcaaagagttggtagctcagagaaccttcgaaaaaccgccctgcaag |
| | gcggttttttcgttttcagagcaagagattacgcgcagaccaaaacgatctcaagaagatcatcttattaatc |
| | agataaaatatttctagatttcagtgcaatttatctcttcaaatgtagcacctgaagtcagccccatacgatat |
| | aagttgttactagtgcttggattctcaccaataaaaaacgcccggcggcaaccgagcgttctgaacaaatc |
| | cagatggagttctgaggtcattactggatctatcaacaggagtccaagcgagctctcgaaccccagagtc |
| | ccgctcagaagaactcgtcaagaaggcgatagaaggcgatgcgctgcgaatcgggagcggcgatacc |
| | gtaaagcacgaggaagcggtcagcccattcgccgccaagctcttcagcaatatcacgggtagccaacg |
| | ctatgtcctgatagcggtccgccacacccagccggccacagtcgatgaatccagaaaagcggccatttt |
| | ccaccatgatattcggcaagcaggcatcgccatgggtcacgacgagatcctcgccgtcgggcatgcgc |
| | gccttgagcctggcgaacagttcggctggcgcgagcccctgatgctcttcgtccagatcatcctgatcga |
| | caagaccggcttccatccgagtacgtgctcgctcgatgcgatgtttcgcttggtggtcgaatgggcaggt |
| | agccggatcaagcgtatgcagccgccgcattgcatcagccatgatggatactttctcggcaggagcaag |
| | gtgagatgacaggagatcctgccccggcacttcgcccaatagcagccagtcccttcccgcttcagtgac |
| | aacgtcgagcacagctgcgcaaggaacgcccgtcgtggccagccacgatagccgcgctgcctcgtcc |
| | tgcagttcattcagggcaccggacaggtcggtcttgacaaaaagaaccgggcgcccctgcgctgacag |
| | ccggaacacggcggcatcagagcagccgattgtctgttgtgcccagtcatagccgaatagcctctccac |
| | ccaagcggccggagaacctgcgtgcaatccatcttgttcaatcatgcgaaacgatcctcatcctgtctctt |
| | gatcagatcttgatcccctgcgccatcagatccttggcggcaagaaagccatccagtttactttgcagggc |
| | ttcccaaccttaccagagggcgccccagctggcaattccgacgtctaagaaaccattattatcatgacatt |
| | aacctataaaaataggcgtatcacgaggccctttcgtcttcac |
| Nucleotide | gtaaaacgacggccagtgaattcgttaagacccactttcacatttaagttgtttttctaatccgcatatgatca |
| sequences of | attcaaggccgaataagaaggctggctctgcaccttggtgatcaaataattcgatagcttgtcgtaataatg |
| pLogic031-tet- | gcggcatactatcagtagtaggtgtttccctttcttctttagcgacttgatgctcttgatcttccaatacgcaac |
| butyrate | ctaaagtaaaatgccccacagcgctgagtgcatataatgcattctctagtgaaaaaccttgttggcataaaa |
| construct (SEQ | aggctaattgattttcgagagtttcatactgtttttctgtaggccgt gtacctaaatgtacttttgctccatcgcg |
| ID NO: 226) The | atgacttagtaaagcacatctaaaacttttagcgttattacgtaaaaaatcttgccagctttccccttctaaag |
| sequence | ggcaaaagtgagtatggtgcctatctaacatctcaatggctaaggcgtcgagcaaagcccgcttattatta |
| encoding TetR is | catgccaatacaatgtaggctgctctacacctagcttctgggcgagtttacgggttgttaaaccttcgattcc |
| underlined, and | gacctcattaagcagctctaatgcgctgttaatcactttacttttatctaatctagacatcattaattcctaattttt |
| the overlapping | [chemical structure] |
| tetR/tetA | attttgtttaactttaagaaggagatatacatatggatttaaattctaaaaaatatcagatgcttaaagagctat |
| promoters are | atgtaagcttcgctgaaaatgaagttaaacctttagcaacagaacttgatgaagaagaaagatttccttatg |
| [chemical structure] | aaacagtggaaaaaatggcaaaagcaggaatgatgggtataccatatccaaaagaatatggtggagaa |
| | ggtggagacactgtaggatatataatggcagttgaagaattgtctagagtttgtggtactacaggagttata |
| | ttatcagctcatacatctcttggctcatggcctatatatcaatatggtaatgaagaacaaaaacaaaaattctt |
| | aagaccactagcaagtggagaaaaattaggagcatttggtcttactgagcctaatgctggtacagatgcgt |
| | ctggccaacaaacaactgctgttttagacggggatgaatacatacttaatggctcaaaaatatttataacaa |
| | acgcaatagctggtgacatatatgtagtaatggcaatgactgataaatctaaggggaacaaaggaatatc |
| | agcatttatagttgaaaaaggaactcctgggtttagctttggagttaaagaaaagaaaatgggtataagag |
| | gttcagctacgagtgaattaatatttgaggattgcagaatacctaaagaaaatttacttggaaaagaaggtc |
| | aaggatttaagatagcaatgtctactcttgatggtggtagaattggtatagctgcacaagctttaggtttagc |
| | acaaggtgctcttgatgaaactgttaaatatgtaaaagaaagagtacaatttggtagaccattatcaaaattc |
| | caaaatacacaattccaattagctgatatggaagttaaggtacaagcggctagacaccttgtatatcaagc |
| | agctataaataaagacttaggaaaaccttatggagtagaagcagcaatggcaaaattatttgcagctgaaa |
| | cagctatggaagttactacaaaagctgtacaacttcatggaggatatggatacactcgtgactatccagta |
| | gaaagaatgatgagagatgctaagataactgaaatatatgaaggaactagtgaagttcaaagaatggttat |
| | ttcaggaaaactattaaaatagtaagaaggagatatacatatggaggaaggatttatgaatatagtcgtttgt |
| | ataaaacaagttccagatacaacagaagttaaactagatcctaatacaggtactttaattagagatggagta |
| | ccaagtataataaaccctgatgataaagcaggtttagaagaagctataaaattaaaagaagaaatgggtg |
| | ctcatgtaactgttataacaatgggacctcctcaagcagatatggctttaaaagaagctttagcaatgggtg |
| | cagatagaggtatattattaacagatagagcatttgcgggtgctgatacttgggcaacttcatcagcattag |
| | caggagcattaaaaaatatagattttgatattataatagctggaagacaggcgatagatggagatactgca |
| | caagttggacctcaaatagctgaacatttaaatcttccatcaataacatatgctgaagaaataaaaactgaa |
| | ggtgaatatgtattagtaaaaagacaatttgaagattgttgccatgacttaaaagttaaaatgccatgccttat |
| | aacaactcttaaagatatgaacacaccaagatacatgaaagttggaagaatatatgatgctttcgaaaatg |
| | atgtagtagaaacatggactgtaaaagatatagaagttgacccttctaatttaggtcttaaaggttctccaac |
| | tagtgtatttaaatcatttacaaaatcagttaaaccagctggtacaatatacaatgaagatgcgaaaacatca |
| | gctggaattatcatagataaattaaaagagaagtatatcatataataagaaggagatatacatatgggtaac |
| | gttttagtagtaatagaacaaagagaaaatgtaattcaaactgtttctttagaattactaggaaaggctacag |
| | aaatagcaaaagattatgatacaaaagtttctgcattacttttaggtagtaaggtagaaggtttaatagatac |
| | attagcacactatggtgcagatgaggtaatagtagtagatgatgaagctttagcagtgtatacaactgaac |
| | catatacaaaagcagcttatgaagcaataaaagcagctgaccctatagttgtattatttggtgcaacttcaat |
| | aggtagagatttagcgcctagagtttctgctagaatacatacaggtcttactgctgactgtacaggtcttgca |
| | gtagctgaagatacaaaattattattaatgacaagacctgcctttggtggaaatataatggcaacaatagttt |
| | gtaaagatttcagacctcaaatgtctacagttagaccaggggttatgaagaaaaatgaacctgatgaaact |
| | aaagaagctgtaattaaccgtttcaaggtagaatttaatgatgctgataaattagttcaagttgtacaagtaat |
| | aaaagaagctaaaaaacaagttaaaatagaagatgctaagatattagtttctgctggacgtggaatgggtg |
| | gaaaagaaaacttagacatactttatgaattagctgaaattataggtggagaagtttctggttctcgtgccac |
| | tatagatgcaggttggttagataaagcaagacaagttggtcaaactggtaaaactgtaagaccagaccttt |
| | atatagcatgtggtatatctggagcaatacaacatatagctggtatggaagatgctgagtttatagttgctat |
| | aaataaaaatccagaagctccaatatttaaatatgctgatgttggtatagttggagatgttcataaagtgcttc |
| | cagaacttatcagtcagttaagtgttgcaaaagaaaaaggtgaagttttagctaactaataagaaggagat |
| | atacatatgagagaagtagtaattgccagtgcagctagaacagcagtaggaagttttggaggagcattta |
| | aatcagtttcagcggtagagttaggggtaacagcagctaaagaagctataaaaagagctaacataactcc |
| | agatatgatagatgaatctcttttagggggagtacttacagcaggtcttggacaaaatatagcaagacaaat |
| | agcattaggagcaggaataccagtagaaaaaccagctatgactataaatatagtttgtggttctggattaag |
| | atctgtttcaatggcatctcaacttatagcattaggtgatgctgatataatgttagttggtggagctgaaaaca |
| | tgagtatgtctccttatttagtaccaagtgcgagatatggtgcaagaatgggtgatgctgcttttgttgattca |
| | atgataaaagatggattatcagacatatttaataactatcacatgggtattactgctgaaaacatagcagag |
| | caatggaatataactagagaagaacaagatgaattagctcttgcaagtcaaaataaagctgaaaaagctc |
| | aagctgaaggaaaatttgatgaagaaatagttcctgttgttataaaaggaagaaaaggtgacactgtagta |
| | gataaagatgaatatattaagcctggcactacaatggagaaacttgctaagttaagacctgcatttaaaaaa |
| | gatggaacagttactgctggtaatgcatcaggaataaatgatggtgctgctatgttagtagtaatggctaaa |
| | gaaaaagctgaagaactaggaatagagcctcttgcaactatagtttcttatggaacagctggtgttgaccct |
| | aaaataatgggatatggaccagttccagcaactaaaaaagctttagaagctgctaatatgactattgaagat |
| | atagatttagttgaagctaatgaggcatttgctgcccaatctgtagctgtaataagagacttaaatatagatat |
| | gaataaagttaatgttaatggtggagcaatagctataggacatccaataggatgctcaggagcaagaata |
| | cttactacacttttatatgaaatgaagagaagagatgctaaaactggtcttgctacactttgtataggcggtg |
| | gaatgggaactactttaatagttaagagatagtaagaaggagatatacatatgaaattagctgtaataggta |
| | gtggaactatgggaagtggtattgtacaaacttttgcaagttgtggacatgatgtatgtttaaagagtagaac |
| | tcaaggtgctatagataaatgtttagctttattagataaaaatttaactaagttagttactaagggaaaaatgg |
| | atgaagctacaaaagcagaaatattaagtcatgttagttcaactactaattatgaagatttaaaagatatgga |
| | tttaataatagaagcatctgtagaagacatgaatataaagaaagatgttttcaagttactagatgaattatgta |
| | aagaagatactatcttggcaacaaatacttcatcattatctataacagaaatagcttcttctactaagcgccc |
| | agataaagttataggaatgcatttctttaatccagttcctatgatgaaattagttgaagttataagtggtcagtt |
| | aacatcaaaagttacttttgatacagtatttgaattatctaagagtatcaataaagtaccagtagatgtatctga |
| | atctcctggatttgtagtaaatagaatacttatacctatgataaatgaagctgttggtatatatgcagatggtgt |
| | tgcaagtaaagaagaaatagatgaagctatgaaattaggagcaaaccatccaatgggaccactagcatta |
| | ggtgatttaatcggattagatgttgttttagctataatgaacgttttatatactgaatttggagatactaaatata |
| | gacctcatccacttttagctaaaatggttagagctaatcaattaggaagaaaaactaagataggattctatg |
| | attataataaataataagaaggagatatacatatgagtacaagtgatgttaaagtttatgagaatgtagctgtt |
| | gaagtagatggaaatatatgtacagtgaaaatgaatagacctaaagcccttaatgcaataaattcaaagac |
| | tttagaagaactttatgaagtatttgtagatattaataatgatgaaactattgatgttgtaatattgacagggga |
| | aggaaaggcatttgtagctggagcagatattgcatacatgaaagatttagatgctgtagctgctaaagattt |
| | tagtatcttaggagcaaaagcttttggagaaatagaaaatagtaaaaaagtagtgatagctgctgtaaacg |
| | gatttgctttaggtggaggatgtgaacttgcaatggcatgtgatataagaattgcatctgctaaagctaaattt |
| | ggtcagccagaagtaactcttggaataactccaggatatggaggaactcaaaggcttacaagattggttg |
| | gaatggcaaaagcaaaagaattaatctttacaggtcaagttataaaagctgatgaagctgaaaaaatagg |
| | gctagtaaatagagtcgttgagccagacattttaatagaagaagttgagaaattagctaagataatagctaa |
| | aaatgctcagcttgcagttagatactctaaagaagcaatacaacttggtgctcaaactgatataaatactgg |
| | aatagatatagaatctaatttatttggtctttgtttttcaactaaagaccaaaaagaaggaatgtcagctttcgtt |
| | gaaaagagagaagctaactttataaaagggtaataagaaggagatatacatatgagaagttttgaagaag |
| | taattaagtttgcaaaagaaagaggacctaaaactatatcagtagcatgttgccaagataaagaagttttaa |
| | tggcagttgaaatggctagaaaagaaaaaatagcaaatgccattttagtaggagatatagaaaagactaa |
| | agaaattgcaaaaagcatagacatggatatcgaaaattatgaactgatagatataaaagatttagcagaag |
| | catctctaaaatctgttgaattagtttcacaaggaaaagccgacatggtaatgaaaggcttagtagacacat |
| | caataatactaaaagcagttttaaataaagaagtaggtcttagaactggaaatgtattaagtcacgtagcag |
| | tatttgatgtagagggatatgatagattatttttcgtaactgacgcagctatgaacttagctcctgatacaaat |
| | actaaaaagcaaatcatagaaaatgcttgcacagtagcacattcattagatataagtgaaccaaaagttgct |
| | gcaatatgcgcaaaagaaaaagtaaatccaaaaatgaaagatacagttgaagctaaagaactagaagaa |
| | atgtatgaaagaggagaaatcaaaggttgtatggttggtgggccttttgcaattgataatgcagtatctttag |
| | aagcagctaaacataaaggtataaatcatcctgtagcaggacgagctgatatattattagccccagatattg |
| | aaggtggtaacatattatataaagctttggtattcttctcaaaatcaaaaaatgcaggagttatagttggggct |
| | aaagcaccaataatattaacttctagagcagacagtgaagaaactaaactaaactcaatagctttaggtgtt |
| | ttaatggcagcaaaggcataataagaaggagatatacatatgagcaaaatatttaaaatcttaacaataaat |
| | cctggttcgacatcaactaaaatagctgtatttgataatgaggatttagtatttgaaaaaactttaagacattct |
| | tcagaagaaataggaaaatatgagaaggtgtctgaccaatttgaatttcgtaaacaagtaatagaagaagc |
| | tctaaaagaaggtggagtaaaaacatctgaattagatgctgtagtaggtagaggaggacttcttaaaccta |
| | taaaaggtggtacttattcagtaagtgctgctatgattgaagatttaaaagtgggagttttaggagaacacg |
| | cttcaaacctaggtggaataatagcaaaacaaataggtgaagaagtaaatgttccttcatacatagtagac |
| | cctgttgttgtagatgaattagaagatgttgctagaatttctggtatgcctgaaataagtagagcaagtgtag |
| | tacatgctttaaatcaaaaggcaatagcaagaagatatgctagagaaataaacaagaaatatgaagatata |
| | aatcttatagttgcacacatgggtggaggagtttctgttggagctcataaaaatggtaaaatagtagatgttg |
| | caaacgcattagatggagaaggacctttctctccagaaagaagtggtggactaccagtaggtgcattagt |
| | aaaaatgtgctttagtggaaaatatactcaagatgaaattaaaaagaaaataaaaggtaatggcggactag |
| | ttgcatacttaaacactaatgatgctagagaagttgaagaaagaattgaagctggtgatgaaaaagctaaa |
| | ttagtatatgaagctatggcatatcaaatctctaaagaaataggagctagtgctgcagttcttaagggagat |
| | gtaaaagcaatattattaactggtggaatcgcatattcaaaaatgtttacagaaatgattgcagatagagtta |
| | aatttatagcagatgtaaaagtttatccaggtgaagatgaaatgattgcattagctcaaggtggacttagagt |
| | tttaactggtgaagaagaggctcaagtttatgataactaataa |
| Nucleotide | gtaaaacgacggccagtgaattcgttaagacccactttcacatttaagttgtttttctaatccgcatatgatca |
| sequences of | attcaaggccgaataagaaggctggctctgcaccaggtgatcaaataattcgatagatgtcgtaataatg |
| pLogic046-tet- | gcggcatactatcagtagtaggtgtttccctttcttctttagcgacttgatgctcttgatcttccaatacgcaac |
| butyrate | ctaaagtaaaatgccccacagcgctgagtgcatataatgcattctctagtgaaaaaccttgttggcataaaa |
| construct (SEQ | aggctaattgattacgagagatcatactgatactgtaggccgtgtacctaaatgtacattgctccatcgce |
| ID NO: 227) The | atgacttagtaaagcacatctaaaacttttagcgttattacgtaaaaaatcttgccagctttccccttctaaag |
| sequence | ggcaaaagtgagtatggtgcctatctaacatctcaatggctaaggcgtcgagcaaagcccgcttattatta |
| encoding TetR is | catgccaatacaatgtaggctgctctacacctagcttctgggcgagtttacgggttgttaaaccttcgattcc |
| underlined, and | gacctcattaagcagctctaatgcgctgttaatcactttacttttatctaatctagacatcattaattcctaattttt |
| the overlapping | [chemical structure] |
| tetR/tetA | attttgtttaactttaagaaggagatatacatatgatcgtaaaacctatggtacgcaacaatatctgcctgaac |
| promoters are | gcccatcctcagggctgcaagaagggagtggaagatcagattgaatataccaagaaacgcattaccgc |
| [chemical structure] | agaagtcaaagctggcgcaaaagctccaaaaaacgttctggtgcttggctgctcaaatggttacggcctg |
| | gcgagccgcattactgctgcgttcggatacggggctgcgaccatcggcgtgtcctttgaaaaagcgggtt |
| | cagaaaccaaatatggtacaccgggatggtacaataatttggcatttgatgaagcggcaaaacgcgagg |
| | gtctttatagcgtgacgatcgacggcgatgcgttttcagacgagatcaaggcccaggtaattgaggaagc |
| | caaaaaaaaaggtatcaaatttgatctgatcgtatacagcttggccagcccagtacgtactgatcctgatac |
| | aggtatcatgcacaaaagcgttttgaaaccctttggaaaaacgttcacaggcaaaacagtagatccgttta |
| | ctggcgagctgaaggaaatctccgcggaaccagcaaatgacgaggaagcagccgccactgttaaagtt |
| | atggggggtgaagattgggaacgttggattaagcagctgtcgaaggaaggcctcttagaagaaggctgt |
| | attaccttggcctatagttatattggccctgaagctacccaagctttgtaccgtaaaggcacaatcggcaag |
| | gccaaagaacacctggaggccacagcacaccgtctcaacaaagagaacccgtcaatccgtgccttcgt |
| | gagcgtgaataaaggcctggtaacccgcgcaagcgccgtaatcccggtaatccctctgtatctcgccag |
| | cttgttcaaagtaatgaaagagaagggcaatcatgaaggttgtattgaacagatcacgcgtctgtacgccg |
| | agcgcctgtaccgtaaagatggtacaattccagttgatgaggaaaatcgcattcgcattgatgattgggag |
| | ttagaagaagacgtccagaaagcggtatccgcgttgatggagaaagtcacgggtgaaaacgcagaatc |
| | tctcactgacttagcggggtaccgccatgatttcttagctagtaacggctttgatgtagaaggtattaattatg |
| | aagcggaagttgaacgcttcgaccgtatctgataagaaggagatatacatatgagagaagtagtaattgc |
| | cagtgcagctagaacagcagtaggaagttttggaggagcatttaaatcagtttcagcggtagagttaggg |
| | gtaacagcagctaaagaagctataaaaagagctaacataactccagatatgatagatgaatctcttttagg |
| | gggagtacttacagcaggtcttggacaaaatatagcaagacaaatagcattaggagcaggaataccagt |
| | agaaaaaccagctatgactataaatatagtttgtggttctggattaagatctgtttcaatggcatctcaacttat |
| | agcattaggtgatgctgatataatgttagttggtggagctgaaaacatgagtatgtctccttatttagtaccaa |
| | gtgcgagatatggtgcaagaatgggtgatgctgcttttgttgattcaatgataaaagatggattatcagacat |
| | atttaataactatcacatgggtattactgctgaaaacatagcagagcaatggaatataactagagaagaac |
| | aagatgaattagctcttgcaagtcaaaataaagctgaaaaagctcaagctgaaggaaaatttgatgaaga |
| | aatagttcctgttgttataaaaggaagaaaaggtgacactgtagtagataaagatgaatatattaagcctgg |
| | cactacaatggagaaacttgctaagttaagacctgcatttaaaaaagatggaacagttactgctggtaatg |
| | catcaggaataaatgatggtgctgctatgttagtagtaatggctaaagaaaaagctgaagaactaggaata |
| | gagcctcttgcaactatagtttcttatggaacagctggtgttgaccctaaaataatgggatatggaccagttc |
| | cagcaactaaaaaagctttagaagctgctaatatgactattgaagatatagatttagttgaagctaatgagg |
| | catttgctgcccaatctgtagctgtaataagagacttaaatatagatatgaataaagttaatgttaatggtgga |
| | gcaatagctataggacatccaataggatgctcaggagcaagaatacttactacacttttatatgaaatgaag |
| | agaagagatgctaaaactggtcttgctacactttgtataggcggtggaatgggaactactttaatagttaag |
| | agatagtaagaaggagatatacatatgaaattagctgtaataggtagtggaactatgggaagtggtattgt |
| | acaaacttttgcaagttgtggacatgatgtatgtttaaagagtagaactcaaggtgctatagataaatgttta |
| | gctttattagataaaaatttaactaagttagttactaagggaaaaatggatgaagctacaaaagcagaaata |
| | ttaagtcatgttagttcaactactaattatgaagatttaaaagatatggatttaataatagaagcatctgtagaa |
| | gacatgaatataaagaaagatgttttcaagttactagatgaattatgtaaagaagatactatcttggcaacaa |
| | atacttcatcattatctataacagaaatagcttcttctactaagcgcccagataaagttataggaatgcatttct |
| | ttaatccagttcctatgatgaaattagttgaagttataagtggtcagttaacatcaaaagttacttttgatacag |
| | tatttgaattatctaagagtatcaataaagtaccagtagatgtatctgaatctcctggatttgtagtaaatagaa |
| | tacttatacctatgataaatgaagctgttggtatatatgcagatggtgttgcaagtaaagaagaaatagatga |
| | agctatgaaattaggagcaaaccatccaatgggaccactagcattaggtgatttaatcggattagatgttgt |
| | tttagctataatgaacgttttatatactgaatttggagatactaaatatagacctcatccacttttagctaaaatg |
| | gttagagctaatcaattaggaagaaaaactaagataggattctatgattataataaataataagaaggagat |
| | atacatatgagtacaagtgatgttaaagtttatgagaatgtagctgttgaagtagatggaaatatatgtacag |
| | tgaaaatgaatagacctaaagcccttaatgcaataaattcaaagactttagaagaactttatgaagtatttgt |
| | agatattaataatgatgaaactattgatgttgtaatattgacaggggaaggaaaggcatttgtagctggagc |
| | agatattgcatacatgaaagatttagatgctgtagctgctaaagattttagtatcttaggagcaaaagcttttg |
| | gagaaatagaaaatagtaaaaaagtagtgatagctgctgtaaacggatttgctttaggtggaggatgtgaa |
| | cttgcaatggcatgtgatataagaattgcatctgctaaagctaaatttggtcagccagaagtaactcttgga |
| | ataactccaggatatggaggaactcaaaggcttacaagattggttggaatggcaaaagcaaaagaattaa |
| | tctttacaggtcaagttataaaagctgatgaagctgaaaaaatagggctagtaaatagagtcgttgagcca |
| | gacattttaatagaagaagttgagaaattagctaagataatagctaaaaatgctcagcttgcagttagatact |
| | ctaaagaagcaatacaacttggtgctcaaactgatataaatactggaatagatatagaatctaatttatttggt |
| | ctttgtttttcaactaaagaccaaaaagaaggaatgtcagctttcgttgaaaagagagaagctaactttataa |
| | aagggtaataagaaggagatatacatatgagaagttttgaagaagtaattaagtttgcaaaagaaagagg |
| | acctaaaactatatcagtagcatgttgccaagataaagaagttttaatggcagttgaaatggctagaaaag |
| | aaaaaatagcaaatgccattttagtaggagatatagaaaagactaaagaaattgcaaaaagcatagacat |
| | ggatatcgaaaattatgaactgatagatataaaagatttagcagaagcatctctaaaatctgttgaattagttt |
| | cacaaggaaaagccgacatggtaatgaaaggcttagtagacacatcaataatactaaaagcagttttaaat |
| | aaagaagtaggtcttagaactggaaatgtattaagtcacgtagcagtatttgatgtagagggatatgataga |
| | ttatttttcgtaactgacgcagctatgaacttagctcctgatacaaatactaaaaagcaaatcatagaaaatg |
| | cttgcacagtagcacattcattagatataagtgaaccaaaagttgctgcaatatgcgcaaaagaaaaagta |
| | aatccaaaaatgaaagatacagttgaagctaaagaactagaagaaatgtatgaaagaggagaaatcaaa |
| | ggttgtatggttggtgggccttttgcaattgataatgcagtatctttagaagcagctaaacataaaggtataa |
| | atcatcctgtagcaggacgagctgatatattattagccccagatattgaaggtggtaacatattatataaagc |
| | tttggtattcttctcaaaatcaaaaaatgcaggagttatagttggggctaaagcaccaataatattaacttcta |
| | gagcagacagtgaagaaactaaactaaactcaatagctttaggtgttttaatggcagcaaaggcataataa |
| | gaaggagatatacatatgagcaaaatatttaaaatcttaacaataaatcctggttcgacatcaactaaaata |
| | gctgtatttgataatgaggatttagtatttgaaaaaactttaagacattcttcagaagaaataggaaaatatga |
| | gaaggtgtctgaccaatttgaatttcgtaaacaagtaatagaagaagctctaaaagaaggtggagtaaaa |
| | acatctgaattagatgctgtagtaggtagaggaggacttcttaaacctataaaaggtggtacttattcagtaa |
| | gtgctgctatgattgaagatttaaaagtgggagttttaggagaacacgcttcaaacctaggtggaataatag |
| | caaaacaaataggtgaagaagtaaatgttccttcatacatagtagaccctgttgttgtagatgaattagaag |
| | atgttgctagaatttctggtatgcctgaaataagtagagcaagtgtagtacatgctttaaatcaaaaggcaat |
| | agcaagaagatatgctagagaaataaacaagaaatatgaagatataaatcttatagttgcacacatgggtg |
| | gaggagtttctgttggagctcataaaaatggtaaaatagtagatgttgcaaacgcattagatggagaagga |
| | cctttctctccagaaagaagtggtggactaccagtaggtgcattagtaaaaatgtgctttagtggaaaatat |
| | actcaagatgaaattaaaaagaaaataaaaggtaatggcggactagttgcatacttaaacactaatgatgc |
| | tagagaagttgaagaaagaattgaagctggtgatgaaaaagctaaattagtatatgaagctatggcatatc |
| | aaatctctaaagaaataggagctagtgctgcagttcttaagggagatgtaaaagcaatattattaactggtg |
| | gaatcgcatattcaaaaatgtttacagaaatgattgcagatagagttaaatttatagcagatgtaaaagtttat |
| | ccaggtgaagatgaaatgattgcattagctcaaggtggacttagagttttaactggtgaagaagaggctca |
| | agtttatgataactaataa |

[1030] In certain constructs, the butyrate gene cassette is placed under the control of a tetracycline-inducible or constitutive promoter.

[1031] In a third butyrate gene cassette, the pbt and buk genes are replaced with tesB. TesB is a thioesterase found in E. Coli that cleaves off the butyrate from butyryl-coA, thus obviating the need for pbt-buk.

[1032] In one embodiment, the tesB cassette is placed under the control of a FNR regulatory region selected from any of the sequences in Table 6. In an alternate embodiment, the tesB cassette is placed under the control of an RNS-responsive regulatory region, e.g., norB, and the bacteria further comprises a gene encoding a corresponding RNS-responsive transcription factor, e.g., nsrR. In yet another embodiment, the tesB cassette is placed under the control of an ROS-responsive regulatory region, e.g., oxyS, and the bacteria further comprises a gene encoding a corresponding ROS-responsive transcription factor, e.g., oxyR. In certain constructs, the different described butyrate gene cassettes are each placed under the control of a tetracycline-inducible or constitutive promoter. For example, genetically engineered Nissle are generated comprising a butyrate gene cassette in which the pbt and buk genes are replaced with tesB expressed under the control of a nitric oxide-responsive regulatory element. SEQ ID NO: 228 comprises a reverse complement of the nsrR repressor gene from Neisseria gonorrhoeae (underlined), intergenic region containing divergent promoters controlling nsrR and the butyrogenic gene cassette and their respective RBS (bold), and the butyrate genes (ter-thiA-hbd-crt-tesB) separated by RBS.

TABLE 37
SEQ ID NO: 228

ttattatcgcaccgcaatcgggattttcgattcataaagcaggtcgtaggtcggctt
gttgagcaggtcttgcagcgtgaaaccgtccagatacgtgaaaaacgacttcattgc
accgccgagtatgcccgtcagccggcaggacggcgtaatcaggcattcgttgttcgg
gcccatacactcgaccagctgcatcggttcgaggtggcggacgaccgcgccgatatt
gatgcgttcgggcggcgcggccagcctcagcccgccgcctttcccgcgtacgctgtg
caagaacccgcctttgaccagcgcggtaaccactttcatcaaatggcttttggaaat
gccgtaggtcgaggcgatggtggcgatattgaccagcgcgtcgtcgttgacggcggt
gtagatgaggacgcgcagcccgtagtcggtatgttgggtcagatacatacaacctcc
ttagtacatgcaaaattatttctagagcaacatacgagccggaagcataaagtgtaa
agcctggggtgcctaatgagttgagttgaggaattataacaggaagaaatattcctc
atacgcttgtaattcctctatggttgttgacaattaatcatcggctcgtataatgta
taacattcatattttgtgaattttaaactctagaaataattttgtttaactttaaga
aggagatatacatatgatcgtaaaacctatggtacgcaacaatatctgcctgaacgc
ccatcctcagggctgcaagaagggagtggaagatcagattgaatataccaagaaacg
cattaccgcagaagtcaaagctggcgcaaaagctccaaaaaacgttctggtgcttgg
ctgctcaaatggttacggcctggcgagccgcattactgctgcgttcggatacggggc
tgcgaccatcggcgtgtcctttgaaaaagcgggttcagaaaccaaatatggtacacc
gggatggtacaataatttggcatttgatgaagcggcaaaacgcgagggtctttatag
cgtgacgatcgacggcgatgcgttttcagacgagatcaaggcccaggtaattgagga
agccaaaaaaaaaggtatcaaatttgatctgatcgtatacagcttggccagcccagt
acgtactgatcctgatacaggtatcatgcacaaaagcgttttgaaaccctttggaaa
aacgttcacaggcaaaacagtagatccgtttactggcgagctgaaggaaatctccgc
ggaaccagcaaatgacgaggaagcagccgccactgttaaagttatggggggtgaaga
ttgggaacgttggattaagcagctgtcgaaggaaggcctcttagaagaaggctgtat
taccttggcctatagttatattggccctgaagctacccaagctttgtaccgtaaagg
cacaatcggcaaggccaaagaacacctggaggccacagcacaccgtctcaacaaaga
gaacccgtcaatccgtgccttcgtgagcgtgaataaaggcctggtaacccgcgcaag
cgccgtaatcccggtaatccctctgtatctcgccagcttgttcaaagtaatgaaaga
gaagggcaatcatgaaggttgtattgaacagatcacgcgtctgtacgccgagcgcct
gtaccgtaaagatggtacaattccagttgatgaggaaaatcgcattcgcattgatga
ttgggagttagaagaagacgtccagaaagcggtatccgcgttgatggagaaagtcac
gggtgaaaacgcagaatctctcactgacttagcggggtaccgccatgatttcttagc
tagtaacggctttgatgtagaaggtattaattatgaagcggaagttgaacgcttcga
ccgtatctgataagaaggagatatacatatgagagaagtagtaattgccagtgcagc
tagaacagcagtaggaagttttggaggagcatttaaatcagtttcagcggtagagtt
aggggtaacagcagctaaagaagctataaaaagagctaacataactccagatatgat
agatgaatctcttttagggggagtacttacagcaggtcttggacaaaatatagcaag
acaaatagcattaggagcaggaataccagtagaaaaaccagctatgactataaatat
agtttgtggttctggattaagatctgtttcaatggcatctcaacttatagcattagg
tgatgctgatataatgttagttggtggagctgaaaacatgagtatgtctccttattt
agtaccaagtgcgagatatggtgcaagaatgggtgatgctgcttttgttgattcaat
gataaaagatggattatcagacatatttaataactatcacatgggtattactgctga
aaacatagcagagcaatggaatataactagagaagaacaagatgaattagctcttgc
aagtcaaaataaagctgaaaaagctcaagctgaaggaaaatttgatgaagaaatagt
tcctgttgttataaaaggaagaaaaggtgacactgtagtagataaagatgaatatat
taagcctggcactacaatggagaaacttgctaagttaagacctgcatttaaaaaaga
tggaacagttactgctggtaatgcatcaggaataaatgatggtgctgctatgttagt
agtaatggctaaagaaaaagctgaagaactaggaatagagcctcttgcaactatagt
ttcttatggaacagctggtgttgaccctaaaataatgggatatggaccagttccagc
aactaaaaaagctttagaagctgctaatatgactattgaagatatagatttagttga
agctaatgaggcatttgctgcccaatctgtagctgtaataagagacttaaatataga
tatgaataaagttaatgttaatggtggagcaatagctataggacatccaataggatg
ctcaggagcaagaatacttactacacttttatatgaaatgaagagaagagatgctaa
aactggtcttgctacactttgtataggcggtggaatgggaactactttaatagttaa
gagatagtaagaaggagatatacatatgaaattagctgtaataggtagtggaactat
gggaagtggtattgtacaaacttttgcaagttgtggacatgatgtatgtttaaagag
tagaactcaaggtgctatagataaatgtttagctttattagataaaaatttaactaa
gttagttactaagggaaaaatggatgaagctacaaaagcagaaatattaagtcatgt
tagttcaactactaattatgaagatttaaaagatatggatttaataatagaagcatc
tgtagaagacatgaatataaagaaagatgttttcaagttactagatgaattatgtaa
agaagatactatcttggcaacaaatacttcatcattatctataacagaaatagcttc
ttctactaagcgcccagataaagttataggaatgcatttctttaatccagttcctat
gatgaaattagttgaagttataagtggtcagttaacatcaaaagttacttttgatac
agtatttgaattatctaagagtatcaataaagtaccagtagatgtatctgaatctcc
tggatttgtagtaaatagaatacttatacctatgataaatgaagctgttggtatata
tgcagatggtgttgcaagtaaagaagaaatagatgaagctatgaaattaggagcaaa
ccatccaatgggaccactagcattaggtgatttaatcggattagatgttgttttagc
tataatgaacgttttatatactgaatttggagatactaaatatagacctcatccact
tttagctaaaatggttagagctaatcaattaggaagaaaaactaagataggattcta
tgattataataaataataagaaggagatatacatatgagtacaagtgatgttaaagt
ttatgagaatgtagctgttgaagtagatggaaatatatgtacagtgaaaatgaatag
acctaaagcccttaatgcaataaattcaaagactttagaagaactttatgaagtatt
tgtagatattaataatgatgaaactattgatgttgtaatattgacaggggaaggaaa
ggcatttgtagctggagcagatattgcatacatgaaagatttagatgctgtagctgc
taaagattttagtatcttaggagcaaaagcttttggagaaatagaaaatagtaaaaa
agtagtgatagctgctgtaaacggatttgctttaggtggaggatgtgaacttgcaat
ggcatgtgatataagaattgcatctgctaaagctaaatttggtcagccagaagtaac
tcttggaataactccaggatatggaggaactcaaaggcttacaagattggttggaat
ggcaaaagcaaaagaattaatctttacaggtcaagttataaaagctgatgaagctga
aaaaatagggctagtaaatagagtcgttgagccagacattttaatagaagaagttga
gaaattagctaagataatagctaaaaatgctcagcttgcagttagatactctaaaga
agcaatacaacttggtgctcaaactgatataaatactggaatagatatagaatctaa
tttatttggtctttgtttttcaactaaagaccaaaaagaaggaatgtcagctttcgt
tgaaaagagagaagctaactttataaaagggtaataagaaggagatatacatatgAG
TCAGGCGCTAAAAAATTTACTGACATTGTTAAATCTGGAAAAAATTGAGGAAGGACT
CTTTCGCGGCCAGAGTGAAGATTTAGGTTTACGCCAGGTGTTTGGCGGCCAGGTCGT
GGGTCAGGCCTTGTATGCTGCAAAAGAGACCGTCCCTGAAGAGCGGCTGGTACATTC
GTTTCACAGCTACTTTCTTCGCCCTGGCGATAGTAAGAAGCCGATTATTTATGATGT
CGAAACGCTGCGTGACGGTAACAGCTTCAGCGCCCGCCGGGTTGCTGCTATTCAAAA
CGGCAAACCGATTTTTTATATGACTGCCTCTTTCCAGGCACCAGAAGCGGGTTTCGA
ACATCAAAAAACAATGCCGTCCGCGCCAGCGCCTGATGGCCTCCCTTCGGAAACGCA
AATCGCCCAATCGCTGGCGCACCTGCTGCCGCCAGTGCTGAAAGATAAATTCATCTG
CGATCGTCCGCTGGAAGTCCGTCCGGTGGAGTTTCATAACCCACTGAAAGGTCACGT
CGCAGAACCACATCGTCAGGTGTGGATCCGCGCAAATGGTAGCGTGCCGGATGACCT
GCGCGTTCATCAGTATCTGCTCGGTTACGCTTCTGATCTTAACTTCCTGCCGGTAGC
TCTACAGCCGCACGGCATCGGTTTTCTCGAACCGGGGATTCAGATTGCCACCATTGA
CCATTCCATGTGGTTCCATCGCCCGTTTAATTTGAATGAATGGCTGCTGTATAGCGT
GGAGAGCACCTCGGCGTCCAGCGCACGTGGCTTTGTGCGCGGTGAGTTTTATACCCA
AGACGGCGTACTGGTTGCCTCGACCGTTCAGGAAGGGGTGATGCGTAATCACAATta
a

### Example 11

### Construction of Vectors for Overproducing Butyrate Using a tet-Inducible Promoter

[1033] To facilitate inducible production of butyrate in Escherichia coli Nissle, the eight genes of the butyrate production pathway from Peptoclostridium difficile (bcd, etfB, etfA, thiA, hbd, crt, bpt, and buk; NCBI), as well as transcriptional and translational elements, were synthesized (Gen, Cambridge, Mass.) and cloned into vector pBR to create pLogic. As synthesized, the genes were placed under control of a tetracycline-inducible promoter, with the tet repressor (tetR) expressed constitutively, divergent from the tet-inducible synthetic butyrate operon. For efficient translation of butyrate genes, each synthetic gene in the operon was separated by a base pair ribosome binding site derived from the T promoter.

[1034] The gene products of bcd-etfA-etfB form a complex that convert crotonyl-CoA to butyryl-CoA, and may show some dependence on oxygen as a co-oxidant. Because an effective probiotic should be able to function in an oxygen-limited environment (e.g. the mammalian gut), and because it has been shown that a single gene from Treponema denticola can functionally replace this three gene complex in an oxygen-independent manner (trans--enoynl-CoA reductase; ter), we created a second plasmid capable of butyrate production in E. coli . Inverse PCR was used to amplify the entire sequence of pLogic outside of the bcd-etfA-etfB region. The ter gene was codon optimized for E. coli codon usage using Integrated DNA technologies online codon optimization tool (https://www.idtdna.com/CodonOpt), synthesized (Genewiz, Cambridge, Mass.), and cloned into this inverse PCR fragment using Gibson assembly to create pLogic.

### Example 12

### Transforming E. coli

[1035] Each plasmid is transformed into E. coli Nissle or E. coli DH5a. All tubes, solutions, and cuvettes are pre-chilled to 4° C. An overnight culture of E. coli Nissle or E. coli DH5a is diluted 1:100 in 5 mL of lysogeny broth (LB) and grown until it reached an OD₆₀₀ of 0.4-0.6. The cell culture medium contains a selection marker, e.g., ampicillin, that is suitable for the plasmid. The E. coli cells are then centrifuged at 2,000 rpm for 5 min. at 4° C., the supernatant is removed, and the cells are resuspended in 1 mL of 4° C. water. The E. coli are again centrifuged at 2,000 rpm for 5 min. at 4° C., the supernatant is removed, and the cells are resuspended in 0.5 mL of 4° C. water. The E. coli are again centrifuged at 2,000 rpm for 5 min. at 4° C., the supernatant is removed, and the cells are finally resuspended in 0.1 mL of 4° C. water. The electroporator is set to 2.5 kV. 0.5 μg of one of the above plasmids is added to the cells, mixed by pipetting, and pipetted into a sterile, chilled cuvette. The dry cuvette is placed into the sample chamber, and the electric pulse is applied. One mL of room-temperature SOC media is immediately added, and the mixture is transferred to a culture tube and incubated at 37° C. for 1 hr. The cells are spread out on an LB plate containing ampicillin and incubated overnight.

[1036] In alternate embodiments, the butyrate cassette can be inserted into the Nissle genome through homologous recombination (Genewiz, Cambridge, Mass.). Organization of the constructs and nucleotide sequences are provided herein. To create a vector capable of integrating the synthesized butyrate cassette construct into the chromosome, Gibson assembly was first used to add 1000 bp sequences of DNA homologous to the Nissle lacZ locus into the R6K origin plasmid pKD3. This targets DNA cloned between these homology arms to be integrated into the lacZ locus in the Nissle genome. Gibson assembly was used to clone the fragment between these arms. PCR was used to amplify the region from this plasmid containing the entire sequence of the homology arms, as well as the butyrate cassette between them. This PCR fragment was used to transform electrocompetent Nissle-pKD46, a strain that contains a temperature-sensitive plasmid encoding the lambda red recombinase genes. After transformation, cells were grown out for 2 hours before plating on chloramphenicol at 20 ug/mL at 37 degrees C. Growth at 37 degrees C. also cures the pKD46 plasmid. Transformants containing cassette were chloramphenicol resistant and lac-minus (lac−).

### Example 13

### Production of Butyrate in Recombinant E. coli

[1037] Production of butyrate is assessed in E. coli Nissle strains containing the butyrate cassettes described above in order to determine the effect of oxygen on butyrate production. All incubations are performed at 37° C. Cultures of E. coli strains DH5a and Nissle transformed with the butyrate cassettes are grown overnight in LB and then diluted 1:200 into 4 mL of M9 minimal medium containing 0.5% glucose. The cells are grown with shaking (250 rpm) for 4-6 h and incubated aerobically or anaerobically in a Coy anaerobic chamber (supplying 90% N2, 5% CO2, 5%H2). One mL culture aliquots are prepared in 1.5 mL capped tubes and incubated in a stationary incubator to limit culture aeration. One tube is removed at each time point (0, 1, 2, 4, and 20 hrs) and analyzed for butyrate concentration by LC-MS to confirm that butyrate production in these recombinant strains can be achieved in a low-oxygen environment.

### Example 14

### Production of Butyrate in Recombinant E. coli

[1038] Production of butyrate is assessed in E. coli Nissle strains containing the butyrate cassettes described above in order to determine the effect of oxygen on butyrate production. All incubations are performed at 37° C. Cultures of E. coli strains DH5a and Nissle transformed with the butyrate cassettes are grown overnight in LB and then diluted 1:200 into 4 mL of M9 minimal medium containing 0.5% glucose. The cells are grown with shaking (250 rpm) for 4-6 h and incubated aerobically or anaerobically in a Coy anaerobic chamber (supplying 90% N2, 5% CO2, 5%H2). One mL culture aliquots are prepared in 1.5 mL capped tubes and incubated in a stationary incubator to limit culture aeration. One tube is removed at each time point (0, 1, 2, 4, and 20 hrs) and analyzed for butyrate concentration by LC-MS to confirm that butyrate production in these recombinant strains can be achieved in a low-oxygen environment.

### Example 15

### Production of Butyrate in Recombinant E. coli Using Tet-Inducible Promoter

[1039] FIG. 2 shows butyrate cassettes described above under the control of a tet-inducible promoter. Production of butyrate is assessed using the methods described below in Example 21. The tet-inducible cassettes tested include (1) tet-butyrate cassette comprising all eight genes (pLOGIC031); (2) tet-butyrate cassette in which the ter is substituted (pLOGIC046) and (3) tet-butyrate cassette in which tesB is substituted in place of pbt and buk genes.

[1040] FIG. 6A shows butyrate production in strains pLOGIC031 and pLOGIC046 in the presence and absence of oxygen, in which there is no significant difference in butyrate production. Enhanced butyrate production was shown in Nissle in low copy plasmid expressing pLOGIC046 which contain a deletion of the final two genes (ptb-buk) and their replacement with the endogenous E. Coli tesB gene (a thioesterase that cleaves off the butyrate portion from butyryl CoA).

[1041] Overnight cultures of cells were diluted 1:100 in Lb and grown for 1.5 hours until early log phase was reached at which point anhydrous tet was added at a final concentration of 100 ng/m1 to induce plasmid expression. After 2 hours induction, cells were washed and resuspended in M9 minimal media containing 0.5% glucose at OD600=0.5. Samples were removed at indicated times and cells spun down. The supernatant was tested for butyrate production using LC-MS. FIG. 6B shows butyrate production in strains comprising a tet-butyrate cassette having ter substitution (pLOGIC046) or the tesB substitution (ptb-buk deletion), demonstrating that the tesB substituted strain has greater butyrate production.

[1042] FIG. 7 shows the BW25113 strain of E. Coli, which is a common cloning strain and the background of the KEIO collection of E. Coli mutants. NuoB mutants having NuoB deletion were obtained. NuoB is a protein complex involved in the oxidation of NADH during respiratory growth (form of growth requiring electron transport). Preventing the coupling of NADH oxidation to electron transport allows an increase in the amount of NADH being used to support butyrate production. FIG. 7 shows that compared with wild-type Nissle, deletion of NuoB results in grater production of butyrate.

TABLE 38
pLOGIC046-tesB-butyrate (SEQ ID NO: 229)
pLOGIC046-tesB-butyrate: SEQ ID NO: 229

gtaaaacgacggccagtgaattcgttaagacccactttcacatttaagttgttt
ttctaatccgcatatgatcaattcaaggccgaataagaaggctggctctgcaccttggt
gatcaaataattcgatagcttgtcgtaataatggcggcatactatcagtagtaggtgtt
tccctttcttctttagcgacttgatgctcttgatcttccaatacgcaacctaaagtaaa
atgccccacagcgctgagtgcatataatgcattctctagtgaaaaaccttgttggcata
aaaaggctaattgattttcgagagtttcatactgtttttctgtaggccgtgtacctaaa
tgtacttttgctccatcgcgatgacttagtaaagcacatctaaaacttttagcgttatt
acgtaaaaaatcttgccagctttccccttctaaagggcaaaagtgagtatggtgcctat
ctaacatctcaatggctaaggcgtcgagcaaagcccgcttattttttacatgccaatac
aatgtaggctgctctacacctagcttctgggcgagtttacgggttgttaaaccttcgat
tccgacctcattaagcagctctaatgcgctgttaatcactttacttttatctaatctag
acatcattaattcctaatttttgttgacactctatcattgatagagttattttaccact
ccctatcagtgatagagaaaagtgaactctagaaataattttgtttaactttaagaagg
agatatacatatgatcgtaaaacctatggtacgcaacaatatctgcctgaacgcccatc
ctcagggctgcaagaagggagtggaagatcagattgaatataccaagaaacgcattacc
gcagaagtcaaagctggcgcaaaagctccaaaaaacgttctggtgcttggctgctcaaa
tggttacggcctggcgagccgcattactgctgcgttcggatacggggctgcgaccatcg
gcgtgtcctttgaaaaagcgggttcagaaaccaaatatggtacaccgggatggtacaat
aatttggcatttgatgaagcggcaaaacgcgagggtctttatagcgtgacgatcgacgg
cgatgcgttttcagacgagatcaaggcccaggtaattgaggaagccaaaaaaaaaggta
tcaaatttgatctgatcgtatacagcttggccagcccagtacgtactgatcctgataca
ggtatcatgcacaaaagcgttttgaaaccctttggaaaaacgttcacaggcaaaacagt
agatccgtttactggcgagctgaaggaaatctccgcggaaccagcaaatgacgaggaag
cagccgccactgttaaagttatggggggtgaagattgggaacgttggattaagcagctg
tcgaaggaaggcctcttagaagaaggctgtattaccttggcctatagttatattggccc
tgaagctacccaagctttgtaccgtaaaggcacaatcggcaaggccaaagaacacctgg
aggccacagcacaccgtctcaacaaagagaacccgtcaatccgtgccttcgtgagcgtg
aataaaggcctggtaacccgcgcaagcgccgtaatcccggtaatccctctgtatctcgc
cagcttgttcaaagtaatgaaagagaagggcaatcatgaaggttgtattgaacagatca
cgcgtctgtacgccgagcgcctgtaccgtaaagatggtacaattccagttgatgaggaa
aatcgcattcgcattgatgattgggagttagaagaagacgtccagaaagcggtatccgc
gttgatggagaaagtcacgggtgaaaacgcagaatctctcactgacttagcggggtacc
gccatgatttcttagctagtaacggctttgatgtagaaggtattaattatgaagcggaa
gttgaacgcttcgaccgtatctgataagaaggagatatacatatgagagaagtagtaat
tgccagtgcagctagaacagcagtaggaagttttggaggagcatttaaatcagtttcag
cggtagagttaggggtaacagcagctaaagaagctataaaaagagctaacataactcca
gatatgatagatgaatctcttttagggggagtacttacagcaggtcttggacaaaatat
agcaagacaaatagcattaggagcaggaataccagtagaaaaaccagctatgactataa
atatagtttgtggttctggattaagatctgtttcaatggcatctcaacttatagcatta
ggtgatgctgatataatgttagttggtggagctgaaaacatgagtatgtctccttattt
agtaccaagtgcgagatatggtgcaagaatgggtgatgctgcttttgttgattcaatga
taaaagatggattatcagacatatttaataactatcacatgggtattactgctgaaaac
atagcagagcaatggaatataactagagaagaacaagatgaattagctcttgcaagtca
aaataaagctgaaaaagctcaagctgaaggaaaatttgatgaagaaatagttcctgttg
ttataaaaggaagaaaaggtgacactgtagtagataaagatgaatatattaagcctggc
actacaatggagaaacttgctaagttaagacctgcatttaaaaaagatggaacagttac
tgctggtaatgcatcaggaataaatgatggtgctgctatgttagtagtaatggctaaag
aaaaagctgaagaactaggaatagagcctcttgcaactatagtttcttatggaacagct
ggtgttgaccctaaaataatgggatatggaccagttccagcaactaaaaaagctttaga
agctgctaatatgactattgaagatatagatttagttgaagctaatgaggcatttgctg
cccaatctgtagctgtaataagagacttaaatatagatatgaataaagttaatgttaat
ggtggagcaatagctataggacatccaataggatgctcaggagcaagaatacttactac
acttttatatgaaatgaagagaagagatgctaaaactggtcttgctacactttgtatag
gcggtggaatgggaactactttaatagttaagagatagtaagaaggagatatacatatg
aaattagctgtaataggtagtggaactatgggaagtggtattgtacaaacttttgcaag
ttgtggacatgatgtatgtttaaagagtagaactcaaggtgctatagataaatgtttag
ctttattagataaaaatttaactaagttagttactaagggaaaaatggatgaagctaca
aaagcagaaatattaagtcatgttagttcaactactaattatgaagatttaaaagatat
ggatttaataatagaagcatctgtagaagacatgaatataaagaaagatgttttcaagt
tactagatgaattatgtaaagaagatactatcttggcaacaaatacttcatcattatct
ataacagaaatagcttcttctactaagcgcccagataaagttataggaatgcatttctt
taatccagttcctatgatgaaattagttgaagttataagtggtcagttaacatcaaaag
ttacttttgatacagtatttgaattatctaagagtatcaataaagtaccagtagatgta
tctgaatctcctggatttgtagtaaatagaatacttatacctatgataaatgaagctgt
tggtatatatgcagatggtgttgcaagtaaagaagaaatagatgaagctatgaaattag
gagcaaaccatccaatgggaccactagcattaggtgatttaatcggattagatgttgtt
ttagctataatgaacgttttatatactgaatttggagatactaaatatagacctcatcc
acttttagctaaaatggttagagctaatcaattaggaagaaaaactaagataggattct
atgattataataaataataagaaggagatatacatatgagtacaagtgatgttaaagtt
tatgagaatgtagctgttgaagtagatggaaatatatgtacagtgaaaatgaatagacc
taaagcccttaatgcaataaattcaaagactttagaagaactttatgaagtatttgtag
atattaataatgatgaaactattgatgttgtaatattgacaggggaaggaaaggcattt
gtagctggagcagatattgcatacatgaaagatttagatgctgtagctgctaaagattt
tagtatcttaggagcaaaagcttttggagaaatagaaaatagtaaaaaagtagtgatag
ctgctgtaaacggatttgctttaggtggaggatgtgaacttgcaatggcatgtgatata
agaattgcatctgctaaagctaaatttggtcagccagaagtaactcttggaataactcc
aggatatggaggaactcaaaggcttacaagattggttggaatggcaaaagcaaaagaat
taatctttacaggtcaagttataaaagctgatgaagctgaaaaaatagggctagtaaat
agagtcgttgagccagacattttaatagaagaagttgagaaattagctaagataatagc
taaaaatgctcagcttgcagttagatactctaaagaagcaatacaacttggtgctcaaa
ctgatataaatactggaatagatatagaatctaatttatttggtctttgtttttcaact
aaagaccaaaaagaaggaatgtcagctttcgttgaaaagagagaagctaactttataaa
agggtaataagaaggagatatacatatgAGTCAGGCGCTAAAAAATTTACTGACATTGT
TAAATCTGGAAAAAATTGAGGAAGGACTCTTTCGCGGCCAGAGTGAAGATTTAGGTTTA
CGCCAGGTGTTTGGCGGCCAGGTCGTGGGTCAGGCCTTGTATGCTGCAAAAGAGACCGT
CCCTGAAGAGCGGCTGGTACATTCGTTTCACAGCTACTTTCTTCGCCCTGGCGATAGTA
AGAAGCCGATTATTTATGATGTCGAAACGCTGCGTGACGGTAACAGCTTCAGCGCCCGC
CGGGTTGCTGCTATTCAAAACGGCAAACCGATTTTTTATATGACTGCCTCTTTCCAGGC
ACCAGAAGCGGGTTTCGAACATCAAAAAACAATGCCGTCCGCGCCAGCGCCTGATGGCC
TCCCTTCGGAAACGCAAATCGCCCAATCGCTGGCGCACCTGCTGCCGCCAGTGCTGAAA
GATAAATTCATCTGCGATCGTCCGCTGGAAGTCCGTCCGGTGGAGTTTCATAACCCACT
GAAAGGTCACGTCGCAGAACCACATCGTCAGGTGTGGATCCGCGCAAATGGTAGCGTGC
CGGATGACCTGCGCGTTCATCAGTATCTGCTCGGTTACGCTTCTGATCTTAACTTCCTG
CCGGTAGCTCTACAGCCGCACGGCATCGGTTTTCTCGAACCGGGGATTCAGATTGCCAC
CATTGACCATTCCATGTGGTTCCATCGCCCGTTTAATTTGAATGAATGGCTGCTGTATA
GCGTGGAGAGCACCTCGGCGTCCAGCGCACGTGGCTTTGTGCGCGGTGAGTTTTATACC
CAAGACGGCGTACTGGTTGCCTCGACCGTTCAGGAAGGGGTGATGCGTAATCACAATta
a

### Example 16

### Production of Butyrate in Recombinant E. coli

[1043] Production of butyrate is assessed in E. coli Nissle strains containing the butyrate cassettes described above in order to determine the effect of oxygen on butyrate production. All incubations are performed at 37° C. Cultures of E. coli strains DH5a and Nissle transformed with the butyrate cassettes are grown overnight in LB and then diluted 1:200 into 4 mL of M9 minimal medium containing 0.5% glucose. The cells are grown with shaking (250 rpm) for 4-6 h and incubated aerobically or anaerobically in a Coy anaerobic chamber (supplying 90% N₂, 5% CO₂, 5%H₂). One mL culture aliquots are prepared in 1.5 mL capped tubes and incubated in a stationary incubator to limit culture aeration. One tube is removed at each time point (0, 1, 2, 4, and 20 hours) and analyzed for butyrate concentration by LC-MS to confirm that butyrate production in these recombinant strains can be achieved in a low-oxygen environment.

[1044] In an alternate embodiment, overnight bacterial cultures were diluted 1:100 into fresh LB and grown for 1.5 hrs to allow entry into early log phase. At this point, long half-life nitric oxide donor (DETA-NO; diethylenetriamine-nitric oxide adduct) was added to cultures at a final concentration of 0.3 mM to induce expression from plasmid. After 2 hours of induction, cells were spun down, supernatant was discarded, and the cells were resuspended in M9 minimal media containing 0.5% glucose. Culture supernatant was then analyzed at indicated time points to assess levels of butyrate production. Genetically engineered Nissle comprising pLogic031-nsrR-norB-butyrate operon construct; SYN507) or (pLogic046-nsrR-norB-butyrate operon construct; SYN--508) produce significantly more butyrate as compared to wild-type Nissle.

[1045] Genetically engineered Nissle were generated comprising a butyrate gene cassette in which the pbt and buk genes are replaced with tesB (SEQ ID NO: 15) expressed under the control of a tetracycline promoter (pLOGIC046-tesB-butyrate; SEQ ID NO: 208). SEQ ID NO: 208 comprises a reverse complement of the tetR repressor (underlined), an intergenic region containing divergent promoters controlling tetR and the butyrate operon and their respective RBS (bold), and the butyrate genes (ter-thiAl-hbd-crt2-tesB) separated by RBS.

[1046] Overnight bacterial cultures were diluted 1:100 into fresh LB and grown for 1.5 hrs to allow entry into early log phase. At this point, anhydrous tetracycline (ATC) was added to cultures at a final concentration of 100 ng/mL to induce expression of butyrate genes from plasmid. After 2 hours of induction, cells were spun down, supernatant was discarded, and the cells were resuspended in M9 minimal media containing 0.5% glucose. Culture supernatant was then analyzed at indicated time points to assess levels of butyrate production. Replacement of pbt and buk with tesB leads to greater levels of butyrate production.

[1047] FIG. 8C shows butyrate production in strains comprising an FNR-butyrate cassette SYN501 (having the ter substitution) in the presence/absence of glucose and oxygen. FIG. 8C shows that bacteria need both glucose and anaerobic conditions for butyrate production from the FNR promoter. Cells were grown aerobically or anaerobically in media containing no glucose (LB) or in media containing glucose at 0.5% (RMC). Culture samples were taken at indicated time pints and supernatant fractions were assessed for butyrate concentration using LC-MS. These data show that SYN501 requires glucose for butyrate production and that in the presence of glucose butyrate production can be enhanced under anaerobic conditions when under the control of the anaerobic FNR-regulated ydfZ promoter.

TABLE 39
Butyrate cassette sequences

| | | SEQ ID |
|---|---|---|
| Description | Sequence | NO |
| ydfZ + RBS | CATTTCCTCTCATCCCATCCGGGGTGAGAGT | SEQ ID |
| (RBS is bolded) | CTTTTCCCCCGACTTATGGCTCATGCATGCAT | NO: 230 |
| | CAAAAAAGATGTGAGCTTGATCAAAAACAA | |
| | AAAATATTTCACTCGACAGGAGTATTTATAT | |
| | TGCGCCCGGATCCCTCTAGAAATAATTTTGT | |
| | TTAACTTTAAGAAGGAGATATACAT | |
| First RBS (in | TTTGTTTAACTTTAAGAAGGAGA | SEQ ID |
| ydfZ = RBS) | | NO: 231 |
| Internal RBS | taagaaggagatatacat | SEQ ID |
| between genes | | NO: 211 |
| Butyrate cassette | CATTTCCTCTCATCCCATCCGGGGTGAGAGT | SEQ ID |
| under the control | CTTTTCCCCCGACTTATGGCTCATGCATGCAT | NO: 232 |
| of the ydfZ | CAAAAAAGATGTGAGCTTGATCAAAAACAA | |
| promoter | AAAATATTTCACTCGACAGGAGTATTTATAT | |
| (uppercase: ydfZ | TGCGCCCGGATCCCTCTAGAAATAATTTTGT | |
| promoter, with | TTAACTTTAAGAAGGAGATATACATatgatcgt | |
| RBS in bold; | aaaacctatggtacgcaacaatatctgcctgaacgcccatcctcagggct | |
| lower case: | gcaagaagggagtggaagatcagattgaatataccaagaaacgcattac | |
| coding regions | cgcagaagtcaaagctggcgcaaaagctccaaaaaacgttctggtgctt | |
| in the following | ggctgctcaaatggttacggcctggcgagccgcattactgctgcgttcgg | |
| order: ter, thiA, | atacggggctgcgaccatcggcgtgtcctttgaaaaagcgggttcagaa | |
| hbd, crt2, pbt, | accaaatatggtacaccgggatggtacaataatttggcatttgatgaagcg | |
| buk, separated | gcaaaacgcgagggtctttatagcgtgacgatcgacggcgatgcgttttc | |
| by internal RBS | agacgagatcaaggcccaggtaattgaggaagccaaaaaaaaaggtat | |
| (uppercase and | caaatttgatctgatcgtatacagcttggccagcccagtacgtactgatcct | |
| underlined) | gatacaggtatcatgcacaaaagcgttttgaaaccctttggaaaaacgttc | |
| | acaggcaaaacagtagatccgtttactggcgagctgaaggaaatctccg | |
| | cggaaccagcaaatgacgaggaagcagccgccactgttaaagttatgg | |
| | ggggtgaagattgggaacgttggattaagcagctgtcgaaggaaggcct | |
| | cttagaagaaggctgtattaccttggcctatagttatattggccctgaagct | |
| | acccaagctttgtaccgtaaaggcacaatcggcaaggccaaagaacacc | |
| | tggaggccacagcacaccgtctcaacaaagagaacccgtcaatccgtg | |
| | ccttcgtgagcgtgaataaaggcctggtaacccgcgcaagcgccgtaat | |
| | cccggtaatccctctgtatctcgccagcttgttcaaagtaatgaaagagaa | |
| | gggcaatcatgaaggttgtattgaacagatcacgcgtctgtacgccgagc | |
| | gcctgtaccgtaaagatggtacaattccagttgatgaggaaaatcgcattc | |
| | gcattgatgattgggagttagaagaagacgtccagaaagcggtatccgc | |
| | gttgatggagaaagtcacgggtgaaaacgcagaatctctcactgacttag | |
| | cggggtaccgccatgatttcttagctagtaacggctttgatgtagaaggtat | |
| | taattatgaagcggaagttgaacgcttcgaccgtatctgaTAAGAA | |
| | GGAGATATACATatgagagaagtagtaattgccagtgcagct | |
| | agaacagcagtaggaagttttggaggagcatttaaatcagtttcagcggta | |
| | gagttaggggtaacagcagctaaagaagctataaaaagagctaacataa | |
| | ctccagatatgatagatgaatctcttttagggggagtacttacagcaggtct | |
| | tggacaaaatatagcaagacaaatagcattaggagcaggaataccagta | |
| | gaaaaaccagctatgactataaatatagtttgtggttctggattaagatctgt | |
| | ttcaatggcatctcaacttatagcattaggtgatgctgatataatgttagttg | |
| | gtggagctgaaaacatgagtatgtctccttatttagtaccaagtgcgagata | |
| | tggtgcaagaatgggtgatgctgcttttgttgattcaatgataaaagatgga | |
| | ttatcagacatatttaataactatcacatgggtattactgctgaaaacatagc | |
| | agagcaatggaatataactagagaagaacaagatgaattagctcttgcaa | |
| | gtcaaaataaagctgaaaaagctcaagctgaaggaaaatttgatgaagaa | |
| | atagttcctgttgttataaaaggaagaaaaggtgacactgtagtagataaa | |
| | gatgaatatattaagcctggcactacaatggagaaacttgctaagttaaga | |
| | cctgcatttaaaaaagatggaacagttactgctggtaatgcatcaggaata | |
| | aatgatggtgctgctatgttagtagtaatggctaaagaaaaagctgaagaa | |
| | ctaggaatagagcctcttgcaactatagtttcttatggaacagctggtgttg | |
| | accctaaaataatgggatatggaccagttccagcaactaaaaaagctttag | |
| | aagctgctaatatgactattgaagatatagatttagttgaagctaatgaggc | |
| | atttgctgcccaatctgtagctgtaataagagacttaaatatagatatgaata | |
| | aagttaatgttaatggtggagcaatagctataggacatccaataggatgct | |
| | caggagcaagaatacttactacacttttatatgaaatgaagagaagagatg | |
| | ctaaaactggtcttgctacactttgtataggcggtggaatgggaactacttt | |
| | aatagttaagagatagTAAGAAGGAGATATACATatgaa | |
| | attagctgtaataggtagtggaactatgggaagtggtattgtacaaactttt | |
| | gcaagttgtggacatgatgtatgtttaaagagtagaactcaaggtgctata | |
| | gataaatgtttagctttattagataaaaatttaactaagttagttactaaggga | |
| | aaaatggatgaagctacaaaagcagaaatattaagtcatgttagttcaact | |
| | actaattatgaagatttaaaagatatggatttaataatagaagcatctgtaga | |
| | agacatgaatataaagaaagatgttttcaagttactagatgaattatgtaaa | |
| | gaagatactatcttggcaacaaatacttcatcattatctataacagaaatag | |
| | cttcttctactaagcgcccagataaagttataggaatgcatttctttaatcca | |
| | gttcctatgatgaaattagttgaagttataagtggtcagttaacatcaaaagt | |
| | tacttttgatacagtatttgaattatctaagagtatcaataaagtaccagtaga | |
| | tgtatctgaatctcctggatttgtagtaaatagaatacttatacctatgataaa | |
| | tgaagctgttggtatatatgcagatggtgttgcaagtaaagaagaaataga | |
| | tgaagctatgaaattaggagcaaaccatccaatgggaccactagcattag | |
| | gtgatttaatcggattagatgttgttttagctataatgaacgttttatatactga | |
| | atttggagatactaaatatagacctcatccacttttagctaaaatggttagag | |
| | ctaatcaattaggaagaaaaactaagataggattctatgattataataaata | |
| | aTAAGAAGGAGATATACATatgagtacaagtgatgttaa | |
| | agtttatgagaatgtagctgttgaagtagatggaaatatatgtacagtgaaa | |
| | atgaatagacctaaagcccttaatgcaataaattcaaagactttagaagaa | |
| | ctttatgaagtatttgtagatattaataatgatgaaactattgatgttgtaatatt | |
| | gacaggggaaggaaaggcatttgtagctggagcagatattgcatacatg | |
| | aaagatttagatgctgtagctgctaaagattttagtatcttaggagcaaaag | |
| | cttttggagaaatagaaaatagtaaaaaagtagtgatagctgctgtaaacg | |
| | gatttgctttaggtggaggatgtgaacttgcaatggcatgtgatataagaat | |
| | tgcatctgctaaagctaaatttggtcagccagaagtaactcttggaataact | |
| | ccaggatatggaggaactcaaaggcttacaagattggttggaatggcaa | |
| | aagcaaaagaattaatctttacaggtcaagttataaaagctgatgaagctg | |
| | aaaaaatagggctagtaaatagagtcgttgagccagacattttaatagaag | |
| | aagttgagaaattagctaagataatagctaaaaatgctcagcttgcagtta | |
| | gatactctaaagaagcaatacaacttggtgctcaaactgatataaatactg | |
| | gaatagatatagaatctaatttatttggtctttgatttcaactaaagaccaaaa | |
| | agaaggaatgtcagctttcgttgaaaagagagaagctaactttataaaag | |
| | ggtaaTAAGAAGGAGATATACATatgagaagttttgaag | |
| | aagtaattaagtttgcaaaagaaagaggacctaaaactatatcagtagcat | |
| | gttgccaagataaagaagttttaatggcagttgaaatggctagaaaagaa | |
| | aaaatagcaaatgccattttagtaggagatatagaaaagactaaagaaatt | |
| | gcaaaaagcatagacatggatatcgaaaattatgaactgatagatataaaa | |
| | gatttagcagaagcatctctaaaatctgttgaattagtttcacaaggaaaag | |
| | ccgacatggtaatgaaaggcttagtagacacatcaataatactaaaagca | |
| | gttttaaataaagaagtaggtcttagaactggaaatgtattaagtcacgtag | |
| | cagtatttgatgtagagggatatgatagattatttttcgtaactgacgcagct | |
| | atgaacttagctcctgatacaaatactaaaaagcaaatcatagaaaatgctt | |
| | gcacagtagcacattcattagatataagtgaaccaaaagttgctgcaatat | |
| | gcgcaaaagaaaaagtaaatccaaaaatgaaagatacagttgaagctaa | |
| | agaactagaagaaatgtatgaaagaggagaaatcaaaggttgtatggttg | |
| | gtgggccttttgcaattgataatgcagtatctttagaagcagctaaacataa | |
| | aggtataaatcatcctgtagcaggacgagctgatatattattagccccaga | |
| | tattgaaggtggtaacatattatataaagctttggtattcttctcaaaatcaaa | |
| | aaatgcaggagttatagttggggctaaagcaccaataatattaacttctag | |
| | agcagacagtgaagaaactaaactaaactcaatagctttaggtgttttaatg | |
| | gcagcaaaggcataaTAAGAAGGAGATATACATatga | |
| | gcaaaatatttaaaatcttaacaataaatcctggttcgacatcaactaaaata | |
| | gctgtatttgataatgaggatttagtatttgaaaaaactttaagacattcttca | |
| | gaagaaataggaaaatatgagaaggtgtctgaccaatttgaatttcgtaaa | |
| | caagtaatagaagaagctctaaaagaaggtggagtaaaaacatctgaatt | |
| | agatgctgtagtaggtagaggaggacttcttaaacctataaaaggtggtac | |
| | ttattcagtaagtgctgctatgattgaagatttaaaagtgggagttttaggag | |
| | aacacgcttcaaacctaggtggaataatagcaaaacaaataggtgaaga | |
| | agtaaatgttccttcatacatagtagaccctgttgttgtagatgaattagaag | |
| | atgttgctagaatttctggtatgcctgaaataagtagagcaagtgtagtaca | |
| | tgctttaaatcaaaaggcaatagcaagaagatatgctagagaaataaaca | |
| | agaaatatgaagatataaatcttatagttgcacacatgggtggaggagtttc | |
| | tgttggagctcataaaaatggtaaaatagtagatgttgcaaacgcattagat | |
| | ggagaaggacctttctctccagaaagaagtggtggactaccagtaggtg | |
| | cattagtaaaaatgtgctttagtggaaaatatactcaagatgaaattaaaaa | |
| | gaaaataaaaggtaatggcggactagttgcatacttaaacactaatgatgc | |
| | tagagaagttgaagaaagaattgaagctggtgatgaaaaagctaaattag | |
| | tatatgaagctatggcatatcaaatctctaaagaaataggagctagtgctg | |
| | cagttcttaagggagatgtaaaagcaatattattaactggtggaatcgcata | |
| | ttcaaaaatgtttacagaaatgattgcagatagagttaaatttatagcagatg | |
| | taaaagtttatccaggtgaagatgaaatgattgcattagctcaaggtggact | |
| | tagagttttaactggtgaagaagaggctcaagtttatgataactaataa | |

[1048] In some embodiments, the genetically engineered bacteria comprise the nucleic acid sequence of SEQ ID NO: 232 or a functional fragment thereof. In some embodiments, the genetically engineered bacteria comprise a nucleic acid sequence that, but for the redundancy of the genetic code, encodes the same polypeptide as SEQ ID NO: 232 or a functional fragment thereof. In some embodiments, genetically engineered bacteria comprise a nucleic acid sequence that is at least about 80%, at least about 85%, at least about 90%, at least about 95%, or at least about 99% homologous to the DNA sequence of SEQ ID NO: 232 or a functional fragment thereof, or a nucleic acid sequence that, but for the redundancy of the genetic code, encodes the same polypeptide as SEQ ID NO: 232 or a functional fragment thereof.

[1049] In alternate embodiments, pbt and buk are replaced with TesB (SEQ ID NO: 15)

[1050] In some embodiments, the butyrate cassette is driven by an inducible promoter. For example, other FNR promoters can be used in lieu of ydfZ, e.g., in SEQ ID NO: 180-196.

[1051] Non-limiting FNR promoter sequences are provided herein. In some embodiments, the genetically engineered bacteria of the invention comprise a butyrate cassette under the control of one or more of promoter sequences found in Table 6, e.g., nirB promoter, ydfZ promoter, nirB promoter fused to a strong ribosome binding site, ydfZ promoter fused to a strong ribosome binding site, fnrS, an anaerobically induced small RNA gene (fnrS promoter), nirB promoter fused to a crp binding site, and fnrS fused to a crp binding site.

[1052] In some embodiments, the butyrate cassette is under the control of a promoter which is inducible by metabolites present in the gut. In some embodiments, the butyrate cassette is induced by HE-specific molecules or metabolites indicative of liver damage, e.g., bilirubin. In some embodiments, the butyrate cassette is placed under the control of promoter, which is inducible by inflammation or an inflammatory response (e.g., RNS or ROS promoter).

[1053] In some embodiments, the genetically engineered bacteria comprise a butyrate cassette driven by a promoter induced by a molecule or metabolite. Promoters that respond to one of these molecules or their metabolites may be used in the genetically engineered bacteria provided herein.

[1054] In some embodiments, the butyrate cassette is inducible by arabinose and is driven by the AraBAD promoter.

### Example 17

### Comparison of In Vitro Butyrate Production Efficacy of Chromosomal Insertion and Plasmid-Bearing Engineered Bacterial Strains

[1055] The in vitro butyrate production efficacy of engineered bacterial strains harboring a chromosomal insertion of a butyrate cassette was compared to a strain bearing a butyrate cassette on a plasmid. SYN1001 and SYN1002 harbor a chromosomal insertion between the agal/rsml locus of a butyrate cassette (either ter→tesB or ter→pbt-buk, respectively) driven by an fnr inducible promoter. These strains were compared side by side with the low copy plasmid strain SYN501 (Logic156 (pSC101 PydfZ-ter ->pbt-buk butyrate plasmid) also driven by an fnr inducible promoter. Butyrate levels in the media were measured at 4 and 24 hours post anaerobic induction.

[1056] Briefly, 3 ml LB was inoculated with bacteria from frozen glycerol stocks. Bacteria were grown overnight at 37 C with shaking. Overnight cultures were diluted 1:100 dilution into 10 ml LB (containing antibiotics) in a 125 ml baffled flask. Cultures were grown aerobically at 37 C with shaking for about 1.5 h, and then transferred to the anaerobic chamber at 37 C for 4 h. Bacteria (2×10⁸ CFU) were added to 1 ml M9 media containing 50 mM MOPS with 0.5% glucose in microcentrifuge tubes. Cells were plated to determine cell counts. The assay tubes were placed in the anaerobic chamber at 37 C. At indicated times (4 and 24 h), 120 ul cells were removed and pelleted at 14,000 rpm for 1 min, and 100 ul of the supernatant was transferred to a 96-well assay plate and sealed with aluminum foil, and stored at −80 C until analysis by LC-MS for butyrate concentrations (as described in Example 21). Results are depicted in FIG. 11, and show that SYN1001 and SYN1002 give comparable butyrate production to the plasmid strain SYN501.

TABLE 40
FRNRs Butyrate Cassette Sequences

| Description | Sequence |
|---|---|
| Pfnrs-ter-thiA1-hbd-ctr2- | GGTACCAGTTGTTCTTATTGGTGGTGTTGCTTTAT |
| tesB | GGTTGCATCGTAGTAAATGGTTGTAACAAAAGC |
| SEQ ID NO: 233, e.g. | AATTTTTCCGGCTGTCTGTATACAAAAACGCCGC |
| integrated into the | AAAGTTTGAGCGAAGTCAATAAACTCTCTACCC |
| chromosome in | ATTCAGGGCAATATCTCTCTTGGATCCAAAGTGA |
| SYN1001 Pfnrs: | ACTCTAGAAATAATTTTGTTTAACTTTAAGAAGG |
| uppercase; butyrate | AGATATACATatgatcgtaaaacctatggtacgcaacaatatctgcctg |
| cassette: lower case | aacgcccatcctcagggctgcaagaagggagtggaagatcagattgaatatac |
| | caagaaacgcattaccgcagaagtcaaagctggcgcaaaagctccaaaaaac |
| | gttctggtgcttggctgctcaaatggttacggcctggcgagccgcattactgctg |
| | cgttcggatacggggctgcgaccatcggcgtgtcctttgaaaaagcgggttcag |
| | aaaccaaatatggtacaccgggatggtacaataatttggcatttgatgaagcggc |
| | aaaacgcgagggtctttatagcgtgacgatcgacggcgatgcgttttcagacga |
| | gatcaaggcccaggtaattgaggaagccaaaaaaaaaggtatcaaatttgatct |
| | gatcgtatacagcttggccagcccagtacgtactgatcctgatacaggtatcatg |
| | cacaaaagcgttttgaaaccctttggaaaaacgttcacaggcaaaacagtagatc |
| | cgtttactggcgagctgaaggaaatctccgcggaaccagcaaatgacgaggaa |
| | gcagccgccactgttaaagttatggggggtgaagattgggaacgttggattaag |
| | cagctgtcgaaggaaggcctcttagaagaaggctgtattaccttggcctatagtt |
| | atattggccctgaagctacccaagctttgtaccgtaaaggcacaatcggcaagg |
| | ccaaagaacacctggaggccacagcacaccgtctcaacaaagagaacccgtc |
| | aatccgtgccttcgtgagcgtgaataaaggcctggtaacccgcgcaagcgccg |
| | taatcccggtaatccctctgtatctcgccagcttgttcaaagtaatgaaagagaag |
| | ggcaatcatgaaggttgtattgaacagatcacgcgtctgtacgccgagcgcctgt |
| | accgtaaagatggtacaattccagttgatgaggaaaatcgcattcgcattgatgat |
| | tgggagttagaagaagacgtccagaaagcggtatccgcgttgatggagaaagt |
| | cacgggtgaaaacgcagaatctctcactgacttagcggggtaccgccatgattt |
| | cttagctagtaacggctttgatgtagaaggtattaattatgaagcggaagttgaac |
| | gcttcgaccgtatctgataagaaggagatatacatatgagagaagtagtaattgc |
| | cagtgcagctagaacagcagtaggaagttttggaggagcatttaaatcagtttca |
| | gcggtagagttaggggtaacagcagctaaagaagctataaaaagagctaacat |
| | aactccagatatgatagatgaatctcttttagggggagtacttacagcaggtcttg |
| | gacaaaatatagcaagacaaatagcattaggagcaggaataccagtagaaaaa |
| | ccagctatgactataaatatagtttgtggttctggattaagatctgtttcaatggcat |
| | ctcaacttatagcattaggtgatgctgatataatgttagttggtggagctgaaaaca |
| | tgagtatgtctccttatttagtaccaagtgcgagatatggtgcaagaatgggtgat |
| | gctgcttttgttgattcaatgataaaagatggattatcagacatatttaataactatca |
| | catgggtattactgctgaaaacatagcagagcaatggaatataactagagaaga |
| | acaagatgaattagctcttgcaagtcaaaataaagctgaaaaagctcaagctgaa |
| | ggaaaatttgatgaagaaatagttcctgttgttataaaaggaagaaaaggtgaca |
| | ctgtagtagataaagatgaatatattaagcctggcactacaatggagaaacttgct |
| | aagttaagacctgcatttaaaaaagatggaacagttactgctggtaatgcatcag |
| | gaataaatgatggtgctgctatgttagtagtaatggctaaagaaaaagctgaaga |
| | actaggaatagagcctcagcaactatagtacttatggaacagctggtgagacc |
| | ctaaaataatgggatatggaccagaccagcaactaaaaaagcatagaagctgc |
| | taatatgactattgaagatatagatttagagaagctaatgaggcatagctgccca |
| | atctgtagctgtaataagagacttaaatatagatatgaataaagttaatgaaatggt |
| | ggagcaatagctataggacatccaataggatgctcaggagcaagaatacttact |
| | acacattatatgaaatgaagagaagagatgctaaaactggtcagctacactagt |
| | ataggcggtggaatgggaactacataatagttaagagatagtaagaaggagat |
| | atacatatgaaattagctgtaataggtagtggaactatgggaagtggtattgtaca |
| | aacattgcaagagtggacatgatgtatgataaagagtagaactcaaggtgctat |
| | agataaatgatagcatattagataaaaatttaactaagttagttactaagggaaaa |
| | atggatgaagctacaaaagcagaaatattaagtcatgaagacaactactaattat |
| | gaagatttaaaagatatggatttaataatagaagcatctgtagaagacatgaatat |
| | aaagaaagatgattcaagttactagatgaattatgtaaagaagatactatcaggc |
| | aacaaatacttcatcattatctataacagaaatagatcactactaagcgcccaga |
| | taaagttataggaatgcatttattaatccagacctatgatgaaattagagaagtta |
| | taagtggtcagttaacatcaaaagttacattgatacagtatttgaattatctaagagt |
| | atcaataaagtaccagtagatgtatctgaatctcctggatagtagtaaatagaata |
| | cttatacctatgataaatgaagctgaggtatatatgcagatggtgagcaagtaaa |
| | gaagaaatagatgaagctatgaaattaggagcaaaccatccaatgggaccacta |
| | gcattaggtgatttaatcggattagatgagattagctataatgaacgattatatact |
| | gaataggagatactaaatatagacctcatccactatagctaaaatggttagagct |
| | aatcaattaggaagaaaaactaagataggattctatgattataataaataataaga |
| | aggagatatacatatgagtacaagtgatgaaaagatatgagaatgtagctgaga |
| | agtagatggaaatatatgtacagtgaaaatgaatagacctaaagcccttaatgca |
| | ataaattcaaagacatagaagaacatatgaagtatagtagatattaataatgatg |
| | aaactattgatgagtaatattgacaggggaaggaaaggcatagtagctggagc |
| | agatattgcatacatgaaagatttagatgctgtagctgctaaagatatagtatctta |
| | ggagcaaaagataggagaaatagaaaatagtaaaaaagtagtgatagctgct |
| | gtaaacggatttgattaggtggaggatgtgaacttgcaatggcatgtgatataag |
| | aattgcatctgctaaagctaaataggtcagccagaagtaactcaggaataactc |
| | caggatatggaggaactcaaaggcttacaagattggttggaatggcaaaagca |
| | aaagaattaatattacaggtcaagttataaaagctgatgaagctgaaaaaatagg |
| | gctagtaaatagagtcgagagccagacatataatagaagaagagagaaattag |
| | ctaagataatagctaaaaatgctcagcttgcagttagatactctaaagaagcaata |
| | caacaggtgctcaaactgatataaatactggaatagatatagaatctaatttatag |
| | gtctttgtttttcaactaaagaccaaaaagaaggaatgtcagctttcgttgaaaaga |
| | gagaagctaacatataaaagggtaataagaaggagatatacatatgagtcagg |
| | cgctaaaaaatttactgacattgaaaatctggaaaaaattgaggaaggactattc |
| | gcggccagagtgaagatttaggtttacgccaggtgtttggcggccaggtcgtgg |
| | gtcaggccagtatgctgcaaaagagaccgtccctgaagagcggctggtacatt |
| | cgatcacagctactacttcgccctggcgatagtaagaagccgattatttatgatgt |
| | cgaaacgctgcgtgacggtaacagcttcagcgcccgccgggagctgctattca |
| | aaacggcaaaccgattattatatgactgcctctaccaggcaccagaagcggga |
| | tcgaacatcaaaaaacaatgccgtccgcgccagcgcctgatggcctccatcgg |
| | aaacgcaaatcgcccaatcgctggcgcacctgctgccgccagtgctgaaagat |
| | aaattcatctgcgatcgtccgctggaagtccgtccggtggagatcataacccact |
| | gaaaggtcacgtcgcagaaccacatcgtcaggtgtggatccgcgcaaatggta |
| | gcgtgccggatgacctgcgcgttcatcagtatctgctcggttacgcttctgatctta |
| | acttcctgccggtagctctacagccgcacggcatcggttttctcgaaccggggat |
| | tcagattgccaccattgaccattccatgtggttccatcgcccgtttaatttgaatgaa |
| | tggctgctgtatagcgtggagagcacctcggcgtccagcgcacgtggctttgtg |
| | cgcggtgagttttatacccaagacggcgtactggttgcctcgaccgttcaggaa |
| | ggggtgatgcgtaatcacaattaa |
| Pfnrs-ter-thiA1-hbd-crt2- | GGTACCAGTTGTTCTTATTGGTGGTGTTGCTTTAT |
| pbt-buk | GGTTGCATCGTAGTAAATGGTTGTAACAAAAGC |
| (SEQ ID NO: 234), e.g. | AATTTTTCCGGCTGTCTGTATACAAAAACGCCGC |
| integrated into the | AAAGTTTGAGCGAAGTCAATAAACTCTCTACCC |
| chromosome in | ATTCAGGGCAATATCTCTCTTGGATCCAAAGTGA |
| SYN1002 Pfnrs: | ACTCTAGAAATAATTTTGTTTAACTTTAAGAAGG |
| uppercase; butyrate | AGATATACATatgatcgtaaaacctatggtacgcaacaatatctgcctg |
| cassette: lower case | aacgcccatcctcagggctgcaagaagggagtggaagatcagattgaatatac |
| | caagaaacgcattaccgcagaagtcaaagctggcgcaaaagctccaaaaaac |
| | gttctggtgcttggctgctcaaatggttacggcctggcgagccgcattactgctg |
| | cgttcggatacggggctgcgaccatcggcgtgtcctttgaaaaagcgggttcag |
| | aaaccaaatatggtacaccgggatggtacaataatttggcatttgatgaagcggc |
| | aaaacgcgagggtctttatagcgtgacgatcgacggcgatgcgttttcagacga |
| | gatcaaggcccaggtaattgaggaagccaaaaaaaaaggtatcaaatttgatct |
| | gatcgtatacagcttggccagcccagtacgtactgatcctgatacaggtatcatg |
| | cacaaaagcgttttgaaaccctttggaaaaacgttcacaggcaaaacagtagatc |
| | cgtttactggcgagctgaaggaaatctccgcggaaccagcaaatgacgaggaa |
| | gcagccgccactgttaaagttatggggggtgaagattgggaacgttggattaag |
| | cagctgtcgaaggaaggcctcttagaagaaggctgtattaccttggcctatagtt |
| | atattggccctgaagctacccaagctttgtaccgtaaaggcacaatcggcaagg |
| | ccaaagaacacctggaggccacagcacaccgtctcaacaaagagaacccgtc |
| | aatccgtgccttcgtgagcgtgaataaaggcctggtaacccgcgcaagcgccg |
| | taatcccggtaatccctctgtatctcgccagcttgttcaaagtaatgaaagagaag |
| | ggcaatcatgaaggttgtattgaacagatcacgcgtctgtacgccgagcgcctgt |
| | accgtaaagatggtacaattccagttgatgaggaaaatcgcattcgcattgatgat |
| | tgggagttagaagaagacgtccagaaagcggtatccgcgttgatggagaaagt |
| | cacgggtgaaaacgcagaatctctcactgacttagcggggtaccgccatgattt |
| | cttagctagtaacggctttgatgtagaaggtattaattatgaagcggaagttgaac |
| | gcttcgaccgtatctgataagaaggagatatacatatgagagaagtagtaattgc |
| | cagtgcagctagaacagcagtaggaagttttggaggagcatttaaatcagtttca |
| | gcggtagagttaggggtaacagcagctaaagaagctataaaaagagctaacat |
| | aactccagatatgatagatgaatctcttttagggggagtacttacagcaggtcttg |
| | gacaaaatatagcaagacaaatagcattaggagcaggaataccagtagaaaaa |
| | ccagctatgactataaatatagtttgtggttctggattaagatctgtttcaatggcat |
| | ctcaacttatagcattaggtgatgctgatataatgttagttggtggagctgaaaaca |
| | tgagtatgtctccttatttagtaccaagtgcgagatatggtgcaagaatgggtgat |
| | gctgcttttgttgattcaatgataaaagatggattatcagacatatttaataactatca |
| | catgggtattactgctgaaaacatagcagagcaatggaatataactagagaaga |
| | acaagatgaattagctcttgcaagtcaaaataaagctgaaaaagctcaagctgaa |
| | ggaaaatttgatgaagaaatagttcctgttgttataaaaggaagaaaaggtgaca |
| | ctgtagtagataaagatgaatatattaagcctggcactacaatggagaaacttgct |
| | aagttaagacctgcatttaaaaaagatggaacagttactgctggtaatgcatcag |
| | gaataaatgatggtgctgctatgttagtagtaatggctaaagaaaaagctgaaga |
| | actaggaatagagcctcagcaactatagtacttatggaacagctggtgagacc |
| | ctaaaataatgggatatggaccagaccagcaactaaaaaagcatagaagctgc |
| | taatatgactattgaagatatagatttagagaagctaatgaggcatagctgccca |
| | atctgtagctgtaataagagacttaaatatagatatgaataaagttaatgaaatggt |
| | ggagcaatagctataggacatccaataggatgctcaggagcaagaatacttact |
| | acacattatatgaaatgaagagaagagatgctaaaactggtcagctacactagt |
| | ataggcggtggaatgggaactacataatagttaagagatagtaagaaggagat |
| | atacatatgaaattagctgtaataggtagtggaactatgggaagtggtattgtaca |
| | aacattgcaagagtggacatgatgtatgataaagagtagaactcaaggtgctat |
| | agataaatgatagcatattagataaaaatttaactaagttagttactaagggaaaa |
| | atggatgaagctacaaaagcagaaatattaagtcatgaagacaactactaattat |
| | gaagatttaaaagatatggatttaataatagaagcatctgtagaagacatgaatat |
| | aaagaaagatgattcaagttactagatgaattatgtaaagaagatactatcaggc |
| | aacaaatacttcatcattatctataacagaaatagatcactactaagcgcccaga |
| | taaagttataggaatgcatttattaatccagacctatgatgaaattagagaagtta |
| | taagtggtcagttaacatcaaaagttacattgatacagtatttgaattatctaagagt |
| | atcaataaagtaccagtagatgtatctgaatctcctggatagtagtaaatagaata |
| | cttatacctatgataaatgaagctgaggtatatatgcagatggtgagcaagtaaa |
| | gaagaaatagatgaagctatgaaattaggagcaaaccatccaatgggaccacta |
| | gcattaggtgatttaatcggattagatgagattagctataatgaacgattatatact |
| | gaataggagatactaaatatagacctcatccactatagctaaaatggttagagct |
| | aatcaattaggaagaaaaactaagataggattctatgattataataaataataaga |
| | aggagatatacatatgagtacaagtgatgaaaagatatgagaatgtagctgaga |
| | agtagatggaaatatatgtacagtgaaaatgaatagacctaaagcccttaatgca |
| | ataaattcaaagacatagaagaacatatgaagtatagtagatattaataatgatg |
| | aaactattgatgagtaatattgacaggggaaggaaaggcatagtagctggagc |
| | agatattgcatacatgaaagatttagatgctgtagctgctaaagatatagtatctta |
| | ggagcaaaagataggagaaatagaaaatagtaaaaaagtagtgatagctgct |
| | gtaaacggatttgattaggtggaggatgtgaacttgcaatggcatgtgatataag |
| | aattgcatctgctaaagctaaataggtcagccagaagtaactcaggaataactc |
| | caggatatggaggaactcaaaggcttacaagattggttggaatggcaaaagca |
| | aaagaattaatattacaggtcaagttataaaagctgatgaagctgaaaaaatagg |
| | gctagtaaatagagtcgagagccagacatataatagaagaagagagaaattag |
| | ctaagataatagctaaaaatgctcagcttgcagttagatactctaaagaagcaata |
| | caacaggtgctcaaactgatataaatactggaatagatatagaatctaatttatag |
| | gtctttgtttttcaactaaagaccaaaaagaaggaatgtcagctttcgttgaaaaga |
| | gagaagctaacatataaaagggtaataagaaggagatatacatatgagaagatt |
| | gaagaagtaattaagtagcaaaagaaagaggacctaaaactatatcagtagcat |
| | gagccaagataaagaagattaatggcagagaaatggctagaaaagaaaaaat |
| | agcaaatgccatatagtaggagatatagaaaagactaaagaaattgcaaaaag |
| | catagacatggatatcgaaaattatgaactgatagatataaaagatttagcagaag |
| | catctctaaaatctgagaattagatcacaaggaaaagccgacatggtaatgaaa |
| | ggcttagtagacacatcaataatactaaaagcagattaaataaagaagtaggtct |
| | tagaactggaaatgtattaagtcacgtagcagtatttgatgtagagggatatgata |
| | gattattatcgtaactgacgcagctatgaacttagctcctgatacaaatactaaaa |
| | agcaaatcatagaaaatgatgcacagtagcacattcattagatataagtgaacc |
| | aaaagagctgcaatatgcgcaaaagaaaaagtaaatccaaaaatgaaagatac |
| | agagaagctaaagaactagaagaaatgtatgaaagaggagaaatcaaaggag |
| | tatggaggtgggccattgcaattgataatgcagtatattagaagcagctaaaca |
| | taaaggtataaatcatcctgtagcaggacgagctgatatattattagccccagata |
| | ttgaaggtggtaacatattatataaagctaggtattcactcaaaatcaaaaaatgc |
| | aggagttatagaggggctaaagcaccaataatattaacactagagcagacagt |
| | gaagaaactaaactaaactcaatagcataggtgattaatggcagcaaaggcata |
| | ataagaaggagatatacatatgagcaaaatatttaaaatcttaacaataaatcctg |
| | gacgacatcaactaaaatagctgtatttgataatgaggatttagtatttgaaaaaac |
| | ataagacattatcagaagaaataggaaaatatgagaaggtgtctgaccaatag |
| | aatacgtaaacaagtaatagaagaagctctaaaagaaggtggagtaaaaacat |
| | ctgaattagatgctgtagtaggtagaggaggacacttaaacctataaaaggtggt |
| | acttattcagtaagtgctgctatgattgaagatttaaaagtgggagattaggagaa |
| | cacgcacaaacctaggtggaataatagcaaaacaaataggtgaagaagtaaat |
| | gaccacatacatagtagaccctgagagtagatgaattagaagatgagctagaa |
| | tactggtatgcctgaaataagtagagcaagtgtagtacatgattaaatcaaaag |
| | gcaatagcaagaagatatgctagagaaataaacaagaaatatgaagatataaat |
| | cttatagagcacacatgggtggaggagtactgaggagctcataaaaatggtaa |
| | aatagtagatgttgcaaacgcattagatggagaaggacctttctctccagaaaga |
| | agtggtggactaccagtaggtgcattagtaaaaatgtgattagtggaaaatatac |
| | tcaagatgaaattaaaaagaaaataaaaggtaatggcggactagagcatactta |
| | aacactaatgatgctagagaagagaagaaagaattgaagctggtgatgaaaaa |
| | gctaaattagtatatgaagctatggcatatcaaatctctaaagaaataggagctag |
| | tgctgcagacttaagggagatgtaaaagcaatattattaactggtggaatcgcat |
| | attcaaaaatgatacagaaatgattgcagatagagttaaatttatagcagatgtaa |
| | aagatatccaggtgaagatgaaatgattgcattagctcaaggtggacttagagat |
| | taactggtgaagaagaggctcaagtttatgataactaa |
| PfNRS (ribosome | GGTACCAGTTGTTCTTATTGGTGGTGTTGCTTTAT |
| binding site is | GGTTGCATCGTAGTAAATGGTTGTAACAAAAGC |
| underlined) | AATTTTTCCGGCTGTCTGTATACAAAAACGCCGC |
| (SEQ ID NO: 235) | AAAGTTTGAGCGAAGTCAATAAACTCTCTACCC |
| | ATTCAGGGCAATATCTCTCTTGGATCCAAAGTGA |
| | ACTCTAGAAATAATTTTGTTTAACTTTAAGAAGG |
| | AGATATACAT |
| Ribosome binding site | CTCTAGAAATAATTTTGTTTAACTTTAAGAAGGA |
| and leader region (SEQ | GATATACAT |
| ID NO: 236) | |

### Example 18

### Assessment of Intestinal Butyrate Levels In Response to SYN501 Administration In Mice

[1057] To determine efficacy of butyrate production by the genetically engineered bacteria in vivo, the levels of butyrate upon administration of SYN501 (Logic156 (pSC101 PydfZ-ter ->pbt-buk butyrate plasmid)) to C57BL6 mice was first assessed in the feces. Water containing 100 mM butyrate was used as a control.

[1058] On day 1, C57BL6 mice (24 total animals) were weighed and randomized into 4 groups; Group 1: H2O2O control (n=6); Group 2-100 mM butyrate (n=6); Group 3-streptomycin resistant Nissle (n=6); Group 4-SYN501 (n=6). Mice were either gavaged with 100 ul streptomycin resistant Nissle or SYN501, and group 2 was changed to H20(+)100 mM butyrate at a dose of 10e10 cells/100u1. On days 2-4, mice were weighted and Groups 3 and 4 were gavaged in the AM and the PM with streptomycin resistant Nissle or SYN501. On day 5, mice were weighed and Groups 3 and 4 were gavaged in the am with streptomycin resistant Nissle or SYN501, and feces was collected and butyrate concentrations determined as described in Example 23. Results are depicted in FIG. 10. Significantly greater levels of butyrate were detected in the feces of the mice gavaged with SYN501 as compared mice gavaged with the Nissle control or those given water only. Levels are close to 2 mM and higher than the levels seen in the mice fed with H20 (+) 200 mM butyrate.

[1059] Next the effects of SYN501 on levels of butyrate in the cecum, cecal effluent, large intestine, and large intestine effluent are assessed. Because baseline concentrations of butyrate are high in these compartments, an antibiotic treatment is administered in advance to clear out the bacteria responsible for butyrate production in the intestine. As a result, smaller differences in butyrate levels can be more accurately observed and measured. Water containing 100 mM butyrate is used as a control.

[1060] During week 1 of the study, animals are treated with an antibiotic cocktail in the drinking water to reduce the baseline levels of resident microflora. The antibiotic cocktail is composed of ABX-ampicillin, vancomycin, neomycin, and metronidazole. During week 2 animals are orally administered 100 ul of streptomycin resistant Nissle or engineered strain SYN501 twice a day for five days (at a dose of 10e10 cells/100 ul).

[1061] On day 1, C57BL6 (Female, 8 weeks) are separated into four groups as follows: Group 1: H20 control (n=10); Group 2: 100 mM butyrate (n=10); Group 3: streptomycin resistant Nissle (n=10); Group 4: SYN501 (n=10). Animals are weighed and feces is collected from the animals (T=0-time point). Animals are changed to H2O (+) antibiotic cocktail. On day 5, animals are weighed and feces is collected (time point T=5d). The H2O (+) antibiotic cocktail bottles are changed. On day 8, the mice are weighed and feces is collected. Mice of Group 3 and Group 4 are gavaged in the AM and PM with streptomycin resistant Nissle or SYN501. The water in all cages is changed to water without antibiotic. Group 2 is provided with 100 mM butyrate in H2O. On days 9-11, mice are weighed, and mice of Group 3 and Group 4 are gavaged in the AM and PM with streptomycin resistant Nissle or SYN501. On day 12, mice are gavaged with streptomycin resistant Nissle or SYN501 in the AM, and 4 hours post dose, blood is harvested, and cecal and large intestinal contents, and tissue, and feces are collected and processed for analysis.

### Example 19

### Measurement of Satiety Markers Upon Administration of SYN501 In Vivo

[1062] To determine whether administration of a butyrate producing strain might result in increased levels of satiety markers, SYN501 is administered to 10-week old C57BL6 (10 weeks) and blood levels of GLP1 and insulin are measured. Butyrate in H20 at 100 mM is used as a control (e.g., as described in Lin et al., Butyrate and Propionate Protect against Diet-Induced Obesity and Regulate Gut Hormones via Free Fatty Acid Receptor 3-Independent Mechanisms, PLOS One, April 2012 | Volume 7 ═ Issue 4 ═ e35240).

[1063] On day 1, animals are randomized and distributed into 5 groups as follows: Group 1: Time 0 control (n=6); Group 2-H20 (+) 100 mM butyrate, 10 min (n=6); Group 3-SYN501, 30 min (n=6); Group 4-SYN501, 4h (n=6); Group 5-H20 (+) 100 mM butyrate, 4h (n=6). Mice are fasted overnight. On day 2, mice are gavaged with either H20(+)100 mM butyrate or SYN501. Then, blood is harvested via cardiac bleed at the following time points post dose: Group 1 is Time 0; Group 2 (H20 (+) 100 mM butyrate) at 10 min; Group 3 (SYN501) at 30 min; Group 4 (SYN501) at 4 h; Group 5 (H20 (+) 100 mM butyrate) at 4 h. Serum is analyzed by ELISA for GLP-1 and insulin. Fecal samples are analyzed for butyrate by MS as described herein.

### Example 20

### Comparison of Butyrate Production Levels Between the Genetically Engineered Bacteria Encoding a Butyrate Cassette and Selected Clostridia strains

[1064] The efficacy of butyrate production in SYN501 (pSC101 PydfZ-ter ->pbt-buk butyrate plasmid) was compared to CBM588 (Clostridia butyricum MIYARISAN, a Japanese probiotic strain), Clostridium tyrobutyricum VPI 5392 (Type Strain), and Clostridium butyricum NCTC 7423 (Type Strain).

[1065] Briefly, overnight cultures of SYN501 were diluted 1:100 dilution and was grown in RCM (Reinforced Clostridial Media, which is similar to LB but contains 05% glucose) at 37 C with shaking for 2 hours, then either moved into the anaerobic chamber or left aerobically shaking. Clostridial strains were only grown anaerobically.

[1066] At indicated times (2, 8, 24, and 48 h), 120 ul cells were removed and pelleted at 14,000 rpm for 1 min, and 100 ul of the supernatant was transferred to a 96-well assay plate and sealed with aluminum foil, and stored at −80 C until analysis by LC-MS for butyrate concentrations (as described in Example 21). Results are depicted in FIG. 12, and show that SYN501 produces butyrate levels comparable to Clostridium spp. in RCM media

### Example 21

### Quantification of Butyrate by LC-MS/NIS

[1067] To obtain the butyrate measurements in Example 37 a LC-MS/MS protocol for butyrate quantification was used.

### Sample Preparation

[1068] First, fresh 1000, 500, 250, 100, 20, 4 and 0.8 μm/mL sodium butyrate standards were prepared in water. Then, 10 μL of sample (bacterial supernatants and standards) were pipetted into a V-bottom polypropylene 96-well plate, and 90 μL of 67% ACN (60 uL ACN+30 uL water per reaction) with 4 ug/mL of butyrate-d7 (CDN isotope) internal standard in final solution were added to each sample. The plate was heat-sealed, mixed well, and centrifuged at 4000 rpm for 5 minutes. In a round-bottom 96-well polypropylene plate, 20 μL of diluted samples were added to 180 μL of a buffer containing 10 mM MES pH4.5, 20 mM EDC (N-(3-Dimethylaminopropyl)-N′-ethylcarbodiimide), and 20 mM TFEA (2,2,2-trifluroethylamine). The plate was again heat-sealed and mixed well, and samples were incubated at room temperature for 1 hour.

### LC-MS/MS Method

[1069] Butyrate was measured by liquid chromatography coupled to tandem mass spectrometry (LC-MS/MS) using a Thermo TSQ Quantum Max triple quadrupole mass spectrometer. HPLC Details are listed in Table 41 and Table 42. Tandem Mass Spectrometry details are found in Table 43.

TABLE 41
HPLC Details

| | |
|---|---|
| Column | Thermo Aquasil C18 |
| | column, 5 μm (50 × 2.1 mm) |
| Mobile | 100% H2O, 0.1% Formic |
| Phase A | Acid |
| Mobile | 100% ACN, 0.1% Formic |
| Phase B | Acid |
| Injection | 10 uL |
| volume | |

TABLE 42
HPLC Method

| Total | Flow | | |
|---|---|---|---|
| Time | Rate | | |
| (min) | (μL/min) | A % | B % |
| 0 | 0.5 | 100 | 0 |
| 1 | 0.5 | 100 | 0 |
| 2 | 0.5 | 10 | 90 |
| 4 | 0.5 | 10 | 90 |
| 4.01 | 0.5 | 100 | 0 |
| 4.25 | 0.5 | 100 | 0 |

TABLE 43
Tandem Mass Spectrometry Details

| Ion Source | HESI-II |
|---|---|
| Polarity | Positive |
| SRM | Butyrate 170.0/71.1, |
| transitions | Butyrate d7 |
| | 177.1/78.3 |

### Example 22

### Quantification of Butyrate in Feces by LC-MS/MS

### Sample Preparation

[1070] Fresh 1000, 500, 250, 100, 20, 4 and 0.8m/mL sodium butyrate standards were prepared in water. Single fecal pellets were ground in 100 uL water and centrifuged at 15,000 rpm for 5min at 4° C. 10 μL of the sample (fecal supernatant and standards) were pipetted into a V-bottom polypropylene 96-well plate, and 90pL of the derivatizing solution containing 50 mM of 2-Hydrazinoquinoline (2-HQ), dipyridyl disulfide, and triphenylphospine in acetonitrile with 5 ug/mL of butyrate-d₇ were added to each sample. The plate was heat-sealed and incubated at 60° C. for 1 hr. The plate was then centrifuged at 4,000 rpm for 5min and 20 μL of the derivatized samples mixed to 180 μL of 22% acetonitrile with 0.1% formic acid.

### LC-MS/MS Method

[1071] Butyrate was measured by liquid chromatography coupled to tandem mass spectrometry (LC-MS/MS) using a Thermo TSQ Quantum Max triple quadrupole mass spectrometer. HPLC Details are listed in Table 44 and Table 45. Tandem Mass Spectrometry details are found in Table 46.

TABLE 44
HPLC Details

| | |
|---|---|
| Column | Luna phenomenex C18 |
| | column, 5 μm (100 × 2.1 mm) |
| Mobile | 100% H2O, 0.1% Formic |
| Phase A | Acid |
| Mobile | 100% ACN, 0.1% Formic |
| Phase B | Acid |
| Injection | 10 uL |
| volume | |

TABLE 45
HPLC Method

| Total | Flow | | |
|---|---|---|---|
| Time | Rate | | |
| (min) | (μL/min) | A % | B % |
| 0 | 0.5 | 95 | 5 |
| 0.5 | 0.5 | 95 | 5 |
| 1.5 | 0.5 | 10 | 90 |
| 3.5 | 0.5 | 10 | 90 |
| 3.51 | 0.5 | 95 | 5 |
| 3.75 | 0.5 | 95 | 5 |

TABLE 46
Tandem Mass Spectrometry Details

| Ion Source | HESI-II |
|---|---|
| Polarity | Positive |
| SRM | Butyrate 230.1/143.1, |
| transitions | Butyrate d7 |
| | 237.1/143.1 |

### Example 23

### Production of Propionate Through the Sleeping Beauty Mutase Pathway in Genetically Engineered E. coli BW25113 and Nissle

[1072] In E. coli , a four gene operon, sbm-ygfD-ygfG-ygfH (sleeping beauty mutase pathway) has been shown to encode a putative cobalamin-dependent pathway with the ability to produce propionate from succinate in vitro. While the sleeping beauty mutase pathway is present in E. coli , it is not under the control of a strong promoter and has shown low activity in vivo.

[1073] The utility of this operon for the production of propionate was assessed. Because E. coli Nissle does not have the complete operon, initial experiments were conducted in E. coli K12 (BW25113).

[1074] First, the native promoter for the sleeping beauty mutase operon on the chromosome in the BW25113 strain was replaced with a fnr promoter (BW25113 ldhA::frt; PfnrS-SBM-cam). The sequence for this construct is provided in Table 47. Mutation of the lactate dehydrogenase gene (ldhA) reportedly increases propionate production, and this mutation is therefore also added in certain embodiments.

TABLE 47
SBM Construct Sequences

| Description | Sequence |
|---|---|
| BW25113 fnrS SBM | [symbol] |
| construct (BW25113 frt- | [symbol] |
| cam-frt-PfnrS-sbm, ygfD, | [symbol] CCGCCGGG |
| ygfG, ygfH), comprising rrnB | AGCGGATTTGAACGTTGCGAAGCAACGGC |
| terminator 1, rrnB terminator 2 | CCGGAGGGTGGCGGGCAGGACGCCCGCC |
| (both italic, uppercase), cat | ATAAACTGCCAGGCATCAAATTAAGC [symbol] |
| promoter and cam resistance | [symbol] TGCGTGG |
| gene (encoded on the | CCAGTGCCAAGCTTGCATGCAGATTGCAG |
| lagging strand underlined | CATTACACGTCTTGAGCGATTGTGTAGGCT |
| uppercase), frt sites (italic | GGAGCTGCTTC [symbol] |
| underlined), FNRS promoter | [symbol] ATTT |
| bold lowercase, with RBS and | AAATGGCGCGCCTTACGCCCCGCCCTGCC |
| leader region bold and | ACTCATCGCAGTACTGTTGTATTCATTAAG |
| underlined and FNR binding site | CATCTGCCGACATGGAAGCCATCACAAAC |
| in bold and italics); sleeping | GGCATGATGAACCTGAATCGCCAGCGGCA |
| beauty operon (sbm, ygfD, | TCAGCACCTTGTCGCCTTGCGTATAATATT |
| ygfG, ygfH) bold and uppercase | TGCCCATGGTGAAAACGGGGGCGAAGAAG |
| (SEQ ID NO: 237) | TTGTCCATATTGGCCACGTTTAAATCAAAA |
| | CTGGTGAAACTCACCCAGGGATTGGCTGA |
| | GACGAAAAACATATTCTCAATAAACCCTTT |
| | AGGGAAATAGGCCAGGTTTTCACCGTAAC |
| | ACGCCACATCTTGCGAATATATGTGTAGAA |
| | ACTGCCGGAAATCGTCGTGGTATTCACTC |
| | CAGAGCGATGAAAACGTTTCAGTTTGCTC |
| | ATGGAAAACGGTGTAACAAGGGTGAACAC |
| | TATCCCATATCACCAGCTCACCGTCTTTCA |
| | TTGCCATACGTAATTCCGGATGAGCATTCA |
| | TCAGGCGGGCAAGAATGTGAATAAAGGCC |
| | GGATAAAACTTGTGCTTATTTTTCTTTACG |
| | GTCTTTAAAAAGGCCGTAATATCCAGCTGA |
| | ACGGTCTGGTTATAGGTACATTGAGCAAC |
| | TGACTGAAATGCCTCAAAATGTTCTTTACG |
| | ATGCCATTGGGATATATCAACGGTGGTAT |
| | ATCCAGTGATTTTTTTCTCCATTTTAGCTT |
| | CCTTAGCTCCTGAAAATCTCGACAACTCAA |
| | AAAATACGCCCGGTAGTGATCTTATTTCAT |
| | TATGGTGAAAGTTGGAACCTCTTACGTGC |
| | CGATCAACGTCTCATTTTCGCCAAAAGTTG |
| | GCCCAGGGCTTCCCGGTATCAACAGGGAC |
| | ACCAGGATTTATTTATTCTGCGAAGTGATC |
| | TTCCGTCACAGGTAGGCGCGCC [symbol] |
| | [symbol] GGAATA |
| | GGAACTAAGGAGGATATTCATATGGACCA |
| | TGGCTAATTCCCAGGTACCagttgttcttattggtggt |
| | gttgctttatggttgcatcgtagtaaatggttgtaacaaaagcaattttt |
| | ccggctgtctgtatacaaaaacgccgcaaagt [symbol] ta |
| | aactctctacccattcagggcaatatctctcttggatccaaagtgaact |
| | ctagaaataattttgtttaactttaagaaggagatatacatATGTC |
| | TAACGTGCAGGAGTGGCAACAGCTTGCCA |
| | ACAAGGAATTGAGCCGTCGGGAGAAAACT |
| | GTCGACTCGCTGGTTCATCAAACCGCGGA |
| | AGGGATCGCCATCAAGCCGCTGTATACCG |
| | AAGCCGATCTCGATAATCTGGAGGTGACA |
| | GGTACCCTTCCTGGTTTGCCGCCCTACGTT |
| | CGTGGCCCGCGTGCCACTATGTATACCGC |
| | CCAACCGTGGACCATCCGTCAGTATGCTG |
| | GTTTTTCAACAGCAAAAGAGTCCAACGCTT |
| | TTTATCGCCGTAACCTGGCCGCCGGGCAA |
| | AAAGGTCTTTCCGTTGCGTTTGACCTTGCC |
| | ACCCACCGTGGCTACGACTCCGATAACCC |
| | GCGCGTGGCGGGCGACGTCGGCAAAGCG |
| | GGCGTCGCTATCGACACCGTGGAAGATAT |
| | GAAAGTCCTGTTCGACCAGATCCCGCTGG |
| | ATAAAATGTCGGTTTCGATGACCATGAATG |
| | GCGCAGTGCTACCAGTACTGGCGTTTTAT |
| | ATCGTCGCCGCAGAAGAGCAAGGTGTTAC |
| | ACCTGATAAACTGACCGGCACCATTCAAA |
| | ACGATATTCTCAAAGAGTACCTCTGCCGCA |
| | ACACCTATATTTACCCACCAAAACCGTCAA |
| | TGCGCATTATCGCCGACATCATCGCCTGG |
| | TGTTCCGGCAACATGCCGCGATTTAATACC |
| | ATCAGTATCAGCGGTTACCACATGGGTGA |
| | AGCGGGTGCCAACTGCGTGCAGCAGGTAG |
| | CATTTACGCTCGCTGATGGGATTGAGTAC |
| | ATCAAAGCAGCAATCTCTGCCGGACTGAA |
| | AATTGATGACTTCGCTCCTCGCCTGTCGTT |
| | CTTCTTCGGCATCGGCATGGATCTGTTTAT |
| | GAACGTCGCCATGTTGCGTGCGGCACGTT |
| | ATTTATGGAGCGAAGCGGTCAGTGGATTT |
| | GGCGCACAGGACCCGAAATCACTGGCGCT |
| | GCGTACCCACTGCCAGACCTCAGGCTGGA |
| | GCCTGACTGAACAGGATCCGTATAACAAC |
| | GTTATCCGCACCACCATTGAAGCGCTGGC |
| | TGCGACGCTGGGCGGTACTCAGTCACTGC |
| | ATACCAACGCCTTTGACGAAGCGCTTGGT |
| | TTGCCTACCGATTTCTCAGCACGCATTGCC |
| | CGCAACACCCAGATCATCATCCAGGAAGA |
| | ATCAGAACTCTGCCGCACCGTCGATCCAC |
| | TGGCCGGATCCTATTACATTGAGTCGCTG |
| | ACCGATCAAATCGTCAAACAAGCCAGAGC |
| | TATTATCCAACAGATCGACGAAGCCGGTG |
| | GCATGGCGAAAGCGATCGAAGCAGGTCTG |
| | CCAAAACGAATGATCGAAGAGGCCTCAGC |
| | GCGCGAACAGTCGCTGATCGACCAGGGCA |
| | AGCGTGTCATCGTTGGTGTCAACAAGTAC |
| | AAACTGGATCACGAAGACGAAACCGATGT |
| | ACTTGAGATCGACAACGTGATGGTGCGTA |
| | ACGAGCAAATTGCTTCGCTGGAACGCATT |
| | CGCGCCACCCGTGATGATGCCGCCGTAAC |
| | CGCCGCGTTGAACGCCCTGACTCACGCCG |
| | CACAGCATAACGAAAACCTGCTGGCTGCC |
| | GCTGTTAATGCCGCTCGCGTTCGCGCCAC |
| | CCTGGGTGAAATTTCCGATGCGCTGGAAG |
| | TCGCTTTCGACCGTTATCTGGTGCCAAGCC |
| | AGTGTGTTACCGGCGTGATTGCGCAAAGC |
| | TATCATCAGTCTGAGAAATCGGCCTCCGA |
| | GTTCGATGCCATTGTTGCGCAAACGGAGC |
| | AGTTCCTTGCCGACAATGGTCGTCGCCCG |
| | CGCATTCTGATCGCTAAGATGGGCCAGGA |
| | TGGACACGATCGCGGCGCGAAAGTGATCG |
| | CCAGCGCCTATTCCGATCTCGGTTTCGAC |
| | GTAGATTTAAGCCCGATGTTCTCTACACCT |
| | GAAGAGATCGCCCGCCTGGCCGTAGAAAA |
| | CGACGTTCACGTAGTGGGCGCATCCTCAC |
| | TGGCTGCCGGTCATAAAACGCTGATCCCG |
| | GAACTGGTCGAAGCGCTGAAAAAATGGGG |
| | ACGCGAAGATATCTGCGTGGTCGCGGGTG |
| | GCGTCATTCCGCCGCAGGATTACGCCTTC |
| | CTGCAAGAGCGCGGCGTGGCGGCGATTTA |
| | TGGTCCAGGTACACCTATGCTCGACAGTG |
| | TGCGCGACGTACTGAATCTGATAAGCCAG |
| | CATCATGATTAATGAAGCCACGCTGGCAG |
| | AAAGTATTCGCCGCTTACGTCAGGGTGAG |
| | CGTGCCACACTCGCCCAGGCCATGACGCT |
| | GGTGGAAAGCCGTCACCCGCGTCATCAGG |
| | CACTAAGTACGCAGCTGCTTGATGCCATTA |
| | TGCCGTACTGCGGTAACACCCTGCGACTG |
| | GGCGTTACCGGCACCCCCGGCGCGGGGAA |
| | AAGTACCTTTCTTGAGGCCTTTGGCATGTT |
| | GTTGATTCGAGAGGGATTAAAGGTCGCGG |
| | TTATTGCGGTCGATCCCAGCAGCCCGGTC |
| | ACTGGCGGTAGCATTCTCGGGGATAAAAC |
| | CCGCATGAATGACCTGGCGCGTGCCGAAG |
| | CGGCGTTTATTCGCCCGGTACCATCCTCC |
| | GGTCATCTGGGCGGTGCCAGTCAGCGAGC |
| | GCGGGAATTAATGCTGTTATGCGAAGCAG |
| | CGGGTTATGACGTAGTGATTGTCGAAACG |
| | GTTGGCGTCGGGCAGTCGGAAACAGAAGT |
| | CGCCCGCATGGTGGACTGTTTTATCTCGTT |
| | GCAAATTGCCGGTGGCGGCGATGATCTGC |
| | AGGGCATTAAAAAAGGGCTGATGGAAGTG |
| | GCTGATCTGATCGTTATCAACAAAGACGAT |
| | GGCGATAACCATACCAATGTCGCCATTGC |
| | CCGGCATATGTACGAGAGTGCCCTGCATA |
| | TTCTGCGACGTAAATACGACGAATGGCAG |
| | CCACGGGTTCTGACTTGTAGCGCACTGGA |
| | AAAACGTGGAATCGATGAGATCTGGCACG |
| | CCATCATCGACTTCAAAACCGCGCTAACTG |
| | CCAGTGGTCGTTTACAACAAGTGCGGCAA |
| | CAACAATCGGTGGAATGGCTGCGTAAGCA |
| | GACCGAAGAAGAAGTACTGAATCACCTGT |
| | TCGCGAATGAAGATTTCGATCGCTATTACC |
| | GCCAGACGCTTTTAGCGGTCAAAAACAAT |
| | ACGCTCTCACCGCGCACCGGCCTGCGGCA |
| | GCTCAGTGAATTTATCCAGACGCAATATTT |
| | TGATTAAAGGAATTTTTATGTCTTATCAGTA |
| | TGTTAACGTTGTCACTATCAACAAAGTGGC |
| | GGTCATTGAGTTTAACTATGGCCGAAAACT |
| | TAATGCCTTAAGTAAAGTCTTTATTGATGA |
| | TCTTATGCAGGCGTTAAGCGATCTCAACC |
| | GGCCGGAAATTCGCTGTATCATTTTGCGC |
| | GCACCGAGTGGATCCAAAGTCTTCTCCGC |
| | AGGTCACGATATTCACGAACTGCCGTCTG |
| | GCGGTCGCGATCCGCTCTCCTATGATGAT |
| | CCATTGCGTCAAATCACCCGCATGATCCAA |
| | AAATTCCCGAAACCGATCATTTCGATGGTG |
| | GAAGGTAGTGTTTGGGGTGGCGCATTTGA |
| | AATGATCATGAGTTCCGATCTGATCATCGC |
| | CGCCAGTACCTCAACCTTCTCAATGACGCC |
| | TGTAAACCTCGGCGTCCCGTATAACCTGG |
| | TCGGCATTCACAACCTGACCCGCGACGCG |
| | GGCTTCCACATTGTCAAAGAGCTGATTTTT |
| | ACCGCTTCGCCAATCACCGCCCAGCGCGC |
| | GCTGGCTGTCGGCATCCTCAACCATGTTG |
| | TGGAAGTGGAAGAACTGGAAGATTTCACC |
| | TTACAAATGGCGCACCACATCTCTGAGAA |
| | AGCGCCGTTAGCCATTGCCGTTATCAAAG |
| | AAGAGCTGCGTGTACTGGGCGAAGCACAC |
| | ACCATGAACTCCGATGAATTTGAACGTATT |
| | CAGGGGATGCGCCGCGCGGTGTATGACAG |
| | CGAAGATTACCAGGAAGGGATGAACGCTT |
| | TCCTCGAAAAACGTAAACCTAATTTCGTTG |
| | GTCATTAATCCCTGCGAACGAAGGAGTAAA |
| | AATGGAAACTCAGTGGACAAGGATGACCG |
| | CCAATGAAGCGGCAGAAATTATCCAGCAT |
| | AACGACATGGTGGCATTTAGCGGCTTTAC |
| | CCCGGCGGGTTCGCCGAAAGCCCTACCCA |
| | CCGCGATTGCCCGCAGAGCTAACGAACAG |
| | CATGAGGCCAAAAAGCCGTATCAAATTCG |
| | CCTTCTGACGGGTGCGTCAATCAGCGCCG |
| | CCGCTGACGATGTACTTTCTGACGCCGAT |
| | GCTGTTTCCTGGCGTGCGCCATATCAAAC |
| | ATCGTCCGGTTTACGTAAAAAGATCAATCA |
| | GGGCGCGGTGAGTTTCGTTGACCTGCATT |
| | TGAGCGAAGTGGCGCAAATGGTCAATTAC |
| | GGTTTCTTCGGCGACATTGATGTTGCCGTC |
| | ATTGAAGCATCGGCACTGGCACCGGATGG |
| | TCGAGTCTGGTTAACCAGCGGGATCGGTA |
| | ATGCGCCGACCTGGCTGCTGCGGGCGAAG |
| | AAAGTGATCATTGAACTCAATCACTATCAC |
| | GATCCGCGCGTTGCAGAACTGGCGGATAT |
| | TGTGATTCCTGGCGCGCCACCGCGGCGCA |
| | ATAGCGTGTCGATCTTCCATGCAATGGATC |
| | GCGTCGGTACCCGCTATGTGCAAATCGAT |
| | CCGAAAAAGATTGTCGCCGTCGTGGAAAC |
| | CAACTTGCCCGACGCCGGTAATATGCTGG |
| | ATAAGCAAAATCCCATGTGCCAGCAGATT |
| | GCCGATAACGTGGTCACGTTCTTATTGCA |
| | GGAAATGGCGCATGGGCGTATTCCGCCGG |
| | AATTTCTGCCGCTGCAAAGTGGCGTGGGC |
| | AATATCAATAATGCGGTAATGGCGCGTCT |
| | GGGGGAAAACCCGGTAATTCCTCCGTTTA |
| | TGATGTATTCGGAAGTGCTACAGGAATCG |
| | GTGGTGCATTTACTGGAAACCGGCAAAAT |
| | CAGCGGGGCCAGCGCCTCCAGCCTGACAA |
| | TCTCGGCCGATTCCCTGCGCAAGATTTAC |
| | GACAATATGGATTACTTTGCCAGCCGCATT |
| | GTGTTGCGTCCGCAGGAGATTTCCAATAA |
| | CCCGGAAATCATCCGTCGTCTGGGCGTCA |
| | TCGCTCTGAACGTCGGCCTGGAGTTTGAT |
| | ATTTACGGGCATGCCAACTCAACACACGT |
| | AGCCGGGGTCGATCTGATGAACGGCATCG |
| | GCGGCAGCGGTGATTTTGAACGCAACGCG |
| | TATCTGTCGATCTTTATGGCCCCGTCGATT |
| | GCTAAAGAAGGCAAGATCTCAACCGTCGT |
| | GCCAATGTGCAGCCATGTTGATCACAGCG |
| | AACACAGCGTCAAAGTGATCATCACCGAA |
| | CAAGGGATCGCCGATCTGCGCGGTCTTTC |
| | CCCGCTTCAACGCGCCCGCACTATCATTG |
| | ATAATTGTGCACATCCTATGTATCGGGATT |
| | ATCTGCATCGCTATCTGGAAAATGCGCCT |
| | GGCGGACATATTCACCACGATCTTAGCCA |
| | CGTCTTCGACTTACACCGTAATTTAATTGC |
| | AACCGGCTCGATGCTGGGTTAA |
| FNRS promoter bold lowercase, | agttgttcttattggtggtgttgctttatggttgcatcgtagtaaatggtt |
| with RBS and leader region | gtaacaaaagcaatttttccggctgtctgtatacaaaaacgccgcaaa |
| bold and underlined, and FNR | gt [symbol] taaactctctacccattcagggcaatatctctct |
| binding site bold and italics); | tggatccaaagtgaactctagaaataattttgtttaactttaagaagga |
| sleeping beauty operon (sbm, | gatatacatATGTCTAACGTGCAGGAGTGGCAA |
| ygfD, ygfG, ygfH) bold and | CAGCTTGCCAACAAGGAATTGAGCCGTCG |
| uppercase | GGAGAAAACTGTCGACTCGCTGGTTCATC |
| (SEQ ID NO: 238) | AAACCGCGGAAGGGATCGCCATCAAGCCG |
| | CTGTATACCGAAGCCGATCTCGATAATCTG |
| | GAGGTGACAGGTACCCTTCCTGGTTTGCC |
| | GCCCTACGTTCGTGGCCCGCGTGCCACTA |
| | TGTATACCGCCCAACCGTGGACCATCCGT |
| | CAGTATGCTGGTTTTTCAACAGCAAAAGA |
| | GTCCAACGCTTTTTATCGCCGTAACCTGGC |
| | CGCCGGGCAAAAAGGTCTTTCCGTTGCGT |
| | TTGACCTTGCCACCCACCGTGGCTACGAC |
| | TCCGATAACCCGCGCGTGGCGGGCGACGT |
| | CGGCAAAGCGGGCGTCGCTATCGACACCG |
| | TGGAAGATATGAAAGTCCTGTTCGACCAG |
| | ATCCCGCTGGATAAAATGTCGGTTTCGAT |
| | GACCATGAATGGCGCAGTGCTACCAGTAC |
| | TGGCGTTTTATATCGTCGCCGCAGAAGAG |
| | CAAGGTGTTACACCTGATAAACTGACCGG |
| | CACCATTCAAAACGATATTCTCAAAGAGTA |
| | CCTCTGCCGCAACACCTATATTTACCCACC |
| | AAAACCGTCAATGCGCATTATCGCCGACA |
| | TCATCGCCTGGTGTTCCGGCAACATGCCG |
| | CGATTTAATACCATCAGTATCAGCGGTTAC |
| | CACATGGGTGAAGCGGGTGCCAACTGCGT |
| | GCAGCAGGTAGCATTTACGCTCGCTGATG |
| | GGATTGAGTACATCAAAGCAGCAATCTCT |
| | GCCGGACTGAAAATTGATGACTTCGCTCC |
| | TCGCCTGTCGTTCTTCTTCGGCATCGGCAT |
| | GGATCTGTTTATGAACGTCGCCATGTTGC |
| | GTGCGGCACGTTATTTATGGAGCGAAGCG |
| | GTCAGTGGATTTGGCGCACAGGACCCGAA |
| | ATCACTGGCGCTGCGTACCCACTGCCAGA |
| | CCTCAGGCTGGAGCCTGACTGAACAGGAT |
| | CCGTATAACAACGTTATCCGCACCACCATT |
| | GAAGCGCTGGCTGCGACGCTGGGCGGTAC |
| | TCAGTCACTGCATACCAACGCCTTTGACGA |
| | AGCGCTTGGTTTGCCTACCGATTTCTCAGC |
| | ACGCATTGCCCGCAACACCCAGATCATCA |
| | TCCAGGAAGAATCAGAACTCTGCCGCACC |
| | GTCGATCCACTGGCCGGATCCTATTACATT |
| | GAGTCGCTGACCGATCAAATCGTCAAACA |
| | AGCCAGAGCTATTATCCAACAGATCGACG |
| | AAGCCGGTGGCATGGCGAAAGCGATCGAA |
| | GCAGGTCTGCCAAAACGAATGATCGAAGA |
| | GGCCTCAGCGCGCGAACAGTCGCTGATCG |
| | ACCAGGGCAAGCGTGTCATCGTTGGTGTC |
| | AACAAGTACAAACTGGATCACGAAGACGA |
| | AACCGATGTACTTGAGATCGACAACGTGA |
| | TGGTGCGTAACGAGCAAATTGCTTCGCTG |
| | GAACGCATTCGCGCCACCCGTGATGATGC |
| | CGCCGTAACCGCCGCGTTGAACGCCCTGA |
| | CTCACGCCGCACAGCATAACGAAAACCTG |
| | CTGGCTGCCGCTGTTAATGCCGCTCGCGT |
| | TCGCGCCACCCTGGGTGAAATTTCCGATG |
| | CGCTGGAAGTCGCTTTCGACCGTTATCTG |
| | GTGCCAAGCCAGTGTGTTACCGGCGTGAT |
| | TGCGCAAAGCTATCATCAGTCTGAGAAAT |
| | CGGCCTCCGAGTTCGATGCCATTGTTGCG |
| | CAAACGGAGCAGTTCCTTGCCGACAATGG |
| | TCGTCGCCCGCGCATTCTGATCGCTAAGA |
| | TGGGCCAGGATGGACACGATCGCGGCGCG |
| | AAAGTGATCGCCAGCGCCTATTCCGATCT |
| | CGGTTTCGACGTAGATTTAAGCCCGATGTT |
| | CTCTACACCTGAAGAGATCGCCCGCCTGG |
| | CCGTAGAAAACGACGTTCACGTAGTGGGC |
| | GCATCCTCACTGGCTGCCGGTCATAAAAC |
| | GCTGATCCCGGAACTGGTCGAAGCGCTGA |
| | AAAAATGGGGACGCGAAGATATCTGCGTG |
| | GTCGCGGGTGGCGTCATTCCGCCGCAGGA |
| | TTACGCCTTCCTGCAAGAGCGCGGCGTGG |
| | CGGCGATTTATGGTCCAGGTACACCTATG |
| | CTCGACAGTGTGCGCGACGTACTGAATCT |
| | GATAAGCCAGCATCATGATTAATGAAGCC |
| | ACGCTGGCAGAAAGTATTCGCCGCTTACG |
| | TCAGGGTGAGCGTGCCACACTCGCCCAGG |
| | CCATGACGCTGGTGGAAAGCCGTCACCCG |
| | CGTCATCAGGCACTAAGTACGCAGCTGCT |
| | TGATGCCATTATGCCGTACTGCGGTAACA |
| | CCCTGCGACTGGGCGTTACCGGCACCCCC |
| | GGCGCGGGGAAAAGTACCTTTCTTGAGGC |
| | CTTTGGCATGTTGTTGATTCGAGAGGGATT |
| | AAAGGTCGCGGTTATTGCGGTCGATCCCA |
| | GCAGCCCGGTCACTGGCGGTAGCATTCTC |
| | GGGGATAAAACCCGCATGAATGACCTGGC |
| | GCGTGCCGAAGCGGCGTTTATTCGCCCGG |
| | TACCATCCTCCGGTCATCTGGGCGGTGCC |
| | AGTCAGCGAGCGCGGGAATTAATGCTGTT |
| | ATGCGAAGCAGCGGGTTATGACGTAGTGA |
| | TTGTCGAAACGGTTGGCGTCGGGCAGTCG |
| | GAAACAGAAGTCGCCCGCATGGTGGACTG |
| | TTTTATCTCGTTGCAAATTGCCGGTGGCGG |
| | CGATGATCTGCAGGGCATTAAAAAAGGGC |
| | TGATGGAAGTGGCTGATCTGATCGTTATC |
| | AACAAAGACGATGGCGATAACCATACCAA |
| | TGTCGCCATTGCCCGGCATATGTACGAGA |
| | GTGCCCTGCATATTCTGCGACGTAAATAC |
| | GACGAATGGCAGCCACGGGTTCTGACTTG |
| | TAGCGCACTGGAAAAACGTGGAATCGATG |
| | AGATCTGGCACGCCATCATCGACTTCAAA |
| | ACCGCGCTAACTGCCAGTGGTCGTTTACA |
| | ACAAGTGCGGCAACAACAATCGGTGGAAT |
| | GGCTGCGTAAGCAGACCGAAGAAGAAGTA |
| | CTGAATCACCTGTTCGCGAATGAAGATTTC |
| | GATCGCTATTACCGCCAGACGCTTTTAGC |
| | GGTCAAAAACAATACGCTCTCACCGCGCA |
| | CCGGCCTGCGGCAGCTCAGTGAATTTATC |
| | CAGACGCAATATTTTGATTAAAGGAATTTT |
| | TATGTCTTATCAGTATGTTAACGTTGTCAC |
| | TATCAACAAAGTGGCGGTCATTGAGTTTAA |
| | CTATGGCCGAAAACTTAATGCCTTAAGTAA |
| | AGTCTTTATTGATGATCTTATGCAGGCGTT |
| | AAGCGATCTCAACCGGCCGGAAATTCGCT |
| | GTATCATTTTGCGCGCACCGAGTGGATCC |
| | AAAGTCTTCTCCGCAGGTCACGATATTCAC |
| | GAACTGCCGTCTGGCGGTCGCGATCCGCT |
| | CTCCTATGATGATCCATTGCGTCAAATCAC |
| | CCGCATGATCCAAAAATTCCCGAAACCGA |
| | TCATTTCGATGGTGGAAGGTAGTGTTTGG |
| | GGTGGCGCATTTGAAATGATCATGAGTTC |
| | CGATCTGATCATCGCCGCCAGTACCTCAA |
| | CCTTCTCAATGACGCCTGTAAACCTCGGC |
| | GTCCCGTATAACCTGGTCGGCATTCACAA |
| | CCTGACCCGCGACGCGGGCTTCCACATTG |
| | TCAAAGAGCTGATTTTTACCGCTTCGCCAA |
| | TCACCGCCCAGCGCGCGCTGGCTGTCGGC |
| | ATCCTCAACCATGTTGTGGAAGTGGAAGA |
| | ACTGGAAGATTTCACCTTACAAATGGCGC |
| | ACCACATCTCTGAGAAAGCGCCGTTAGCC |
| | ATTGCCGTTATCAAAGAAGAGCTGCGTGT |
| | ACTGGGCGAAGCACACACCATGAACTCCG |
| | ATGAATTTGAACGTATTCAGGGGATGCGC |
| | CGCGCGGTGTATGACAGCGAAGATTACCA |
| | GGAAGGGATGAACGCTTTCCTCGAAAAAC |
| | GTAAACCTAATTTCGTTGGTCATTAATCCC |
| | TGCGAACGAAGGAGTAAAAATGGAAACTCA |
| | GTGGACAAGGATGACCGCCAATGAAGCGG |
| | CAGAAATTATCCAGCATAACGACATGGTG |
| | GCATTTAGCGGCTTTACCCCGGCGGGTTC |
| | GCCGAAAGCCCTACCCACCGCGATTGCCC |
| | GCAGAGCTAACGAACAGCATGAGGCCAAA |
| | AAGCCGTATCAAATTCGCCTTCTGACGGG |
| | TGCGTCAATCAGCGCCGCCGCTGACGATG |
| | TACTTTCTGACGCCGATGCTGTTTCCTGGC |
| | GTGCGCCATATCAAACATCGTCCGGTTTAC |
| | GTAAAAAGATCAATCAGGGCGCGGTGAGT |
| | TTCGTTGACCTGCATTTGAGCGAAGTGGC |
| | GCAAATGGTCAATTACGGTTTCTTCGGCG |
| | ACATTGATGTTGCCGTCATTGAAGCATCG |
| | GCACTGGCACCGGATGGTCGAGTCTGGTT |
| | AACCAGCGGGATCGGTAATGCGCCGACCT |
| | GGCTGCTGCGGGCGAAGAAAGTGATCATT |
| | GAACTCAATCACTATCACGATCCGCGCGTT |
| | GCAGAACTGGCGGATATTGTGATTCCTGG |
| | CGCGCCACCGCGGCGCAATAGCGTGTCGA |
| | TCTTCCATGCAATGGATCGCGTCGGTACC |
| | CGCTATGTGCAAATCGATCCGAAAAAGAT |
| | TGTCGCCGTCGTGGAAACCAACTTGCCCG |
| | ACGCCGGTAATATGCTGGATAAGCAAAAT |
| | CCCATGTGCCAGCAGATTGCCGATAACGT |
| | GGTCACGTTCTTATTGCAGGAAATGGCGC |
| | ATGGGCGTATTCCGCCGGAATTTCTGCCG |
| | CTGCAAAGTGGCGTGGGCAATATCAATAA |
| | TGCGGTAATGGCGCGTCTGGGGGAAAACC |
| | CGGTAATTCCTCCGTTTATGATGTATTCGG |
| | AAGTGCTACAGGAATCGGTGGTGCATTTA |
| | CTGGAAACCGGCAAAATCAGCGGGGCCAG |
| | CGCCTCCAGCCTGACAATCTCGGCCGATT |
| | CCCTGCGCAAGATTTACGACAATATGGATT |
| | ACTTTGCCAGCCGCATTGTGTTGCGTCCG |
| | CAGGAGATTTCCAATAACCCGGAAATCAT |
| | CCGTCGTCTGGGCGTCATCGCTCTGAACG |
| | TCGGCCTGGAGTTTGATATTTACGGGCAT |
| | GCCAACTCAACACACGTAGCCGGGGTCGA |
| | TCTGATGAACGGCATCGGCGGCAGCGGTG |
| | ATTTTGAACGCAACGCGTATCTGTCGATCT |
| | TTATGGCCCCGTCGATTGCTAAAGAAGGC |
| | AAGATCTCAACCGTCGTGCCAATGTGCAG |
| | CCATGTTGATCACAGCGAACACAGCGTCA |
| | AAGTGATCATCACCGAACAAGGGATCGCC |
| | GATCTGCGCGGTCTTTCCCCGCTTCAACG |
| | CGCCCGCACTATCATTGATAATTGTGCACA |
| | TCCTATGTATCGGGATTATCTGCATCGCTA |
| | TCTGGAAAATGCGCCTGGCGGACATATTC |
| | ACCACGATCTTAGCCACGTCTTCGACTTAC |
| | ACCGTAATTTAATTGCAACCGGCTCGATGC |
| | TGGGTTAA |

[1075] Next, this strain was tested for propionate production.

[1076] Briefly, 3 ml LB (containing selective antibiotics (cam) where necessary was inoculated from frozen glycerol stocks with either wild type E. coli K12 or the genetically engineered bacteria comprising the chromosomal sleeping beauty mutase operon under the control of a FNR promoter. Bacteria were grown overnight at 37 C with shaking. Overnight cultures were diluted 1:100 into 10 ml LB in a 125 ml baffled flask. Cultures were grown aerobically at 37 C with shaking for about 1.5 h, and then transferred to the anaerobic chamber at 37 C for 4h. Bacteria (2X10⁸ CFU) were added to 1 ml M9 media containing 50 mM MOPS with 0.5% glucose in microcentrifuge tubes. Cells were plated to determine cell counts. The assay tubes were placed in the anaerobic chamber at 37 C. At 1, 2, and 24 hours, 120 ul of cells were removed and pelleted at 14,000 rpm for 1 min, and 100 ul of the supernatant was transferred to a 96-well assay plate and sealed with aluminum foil, and stored at −80 C until analysis by LC-MS for propionate concentrations, as described in

[1077] Results are depicted in FIG. 22B and show that the genetically engineered strain produces ˜2.5 mM after 24 h, while very little or no propionate production was detected from the E. coli K12 wild type strain. Propionate was measured as described in Example 26.

### Example 24

### Evaluation of the Sleeping Beauty Mutase Pathway for the Production of Propionate in E coli Nissle

[1078] Next, the SBM pathway is evaluated for propionate production in E. coli Nissle. Nissle does not have the full 4-gene sleeping beauty mutase operon; it only has the first gene and a partial gene of the second, and genes 3 and 4 are missing. Therefore, recombineering is used to introduce this pathway into Nissle. The frt-cam-frt-PfnrS-sbm, ygfD, ygfG, ygfH construct is inserted at the location of the endogenous, truncated Nissle SBM. Next, the construct is transformed into E coli Nissle and tested for propionate production essentially as described above.

### Example 25

### Evaluation of the Acrylate Pathway from Clostridium propionicum for Propionate Production

[1079] The acrylate pathway from Clostridium propionicum is evaluated for adaptation to propionate production in E. coli . A construct (Ptet-pct-1cdABC-acrABC), codon optimized for E. coli , was synthesized by Genewiz and placed in a high copy plasmid (Logic051). Additionally, another construct is generated for side by side testing, in which the acrABC genes (which may be the rate limiting step of the pathway) are replaced with the acuI gene from Rhodobacter sphaeroides (Ptet- acuI-pct-lcdABC). Subsequently these constructs are transformed into BW25113 and are assessed for their ability to produce propionate, as compared to the type BW5113 strain as described above in Example 23. Propionate was measured as described in Example 26.

Table 48 of Exemplary Propionate Cassette Sequences

| Description | |
|---|---|
| and SEQ ID | |
| NO | Sequence |
| Ptet-pct- | ttaagacccactttcacatttaagttgatttctaatccgcatatgatcaattcaaggccgaataaga |
| lcdABC- | aggctggctctgcaccttggtgatcaaataattcgatagcttgtcgtaataatggcggcatactat |
| acrABC; Ptet: | cagtagtaggtgtttccctttcttctttagcgacttgatgctcttgatcttccaatacgcaacctaaa |
| lower case; | gtaaaatgccccacagcgctgagtgcatataatgcattctctagtgaaaaaccttgttggcataa |
| tertR/tetA | aaaggctaattgattttcgagagtttcatactgatttctgtaggccgtgtacctaaatgtacttttgc |
| promoter | tccatcgcgatgacttagtaaagcacatctaaaacttttagcgttattacgtaaaaaatcttgcca |
| within Ptet: | gctttccccttctaaagggcaaaagtgagtatggtgcctatctaacatctcaatggctaaggcgt |
| lower case | cgagcaaagcccgcttattttttacatgccaatacaatgtaggctgctctacacctagcttctggg |
| bold, with tet | cgagtttacgggttgttaaaccttcgattccgacctcattaagcagctctaatgcgctgttaatca |
| operator: | ctttacttttatctaatctagacatcattaattcctaatttttgttgacactctatcattgatagagtt |
| lower case | attttaccactccctatcagtgatagagaaaagtgaactctagaaataattttgtttaacttta |
| bold | agaaggagatatacatATGCGCAAAGTGCCGATTATCACGGCTG |
| underlined; | ACGAGGCCGCAAAACTGATCAAGGACGGCGACACCGTG |
| ribosome | ACAACTAGCGGCTTTGTGGGTAACGCGATCCCTGAGGCC |
| binding site | CTTGACCGTGCAGTCGAAAAGCGTTTCCTGGAAACGGGC |
| and leader: | GAACCGAAGAACATTACTTATGTATATTGCGGCAGTCAG |
| lowe case | GGCAATCGCGACGGTCGTGGCGCAGAACATTTCGCGCAT |
| italic; | GAAGGCCTGCTGAAACGTTATATCGCTGGCCATTGGGCG |
| ribosome | ACCGTCCCGGCGTTAGGGAAAATGGCCATGGAGAATAA |
| binding sites: | AATGGAGGCCTACAATGTCTCTCAGGGCGCCTTGTGTCA |
| lower case | TCTCTTTCGCGATATTGCGAGCCATAAACCGGGTGTGTTC |
| underlined; | ACGAAAGTAGGAATCGGCACCTTCATTGATCCACGTAAC |
| coding | GGTGGTGGGAAGGTCAACGATATTACCAAGGAAGATAT |
| regions: upper | CGTAGAACTGGTGGAAATTAAAGGGCAGGAATACCTGTT |
| case; (SEQ ID | TTATCCGGCGTTCCCGATCCATGTCGCGCTGATTCGTGGC |
| NO: 239) | ACCTATGCGGACGAGAGTGGTAACATCACCTTTGAAAAA |
| | GAGGTAGCGCCTTTGGAAGGGACTTCTGTCTGTCAAGCG |
| | GTGAAGAACTCGGGTGGCATTGTCGTGGTTCAGGTTGAG |
| | CGTGTCGTCAAAGCAGGCACGCTGGATCCGCGCCATGTG |
| | AAAGTTCCGGGTATCTATGTAGATTACGTAGTCGTCGCG |
| | GATCCGGAGGACCATCAACAGTCCCTTGACTGCGAATAT |
| | GATCCTGCCCTTAGTGGAGAGCACCGTCGTCCGGAGGTG |
| | GTGGGTGAACCACTGCCTTTATCCGCGAAGAAAGTCATC |
| | GGCCGCCGTGGCGCGATTGAGCTCGAGAAAGACGTTGCA |
| | GTGAACCTTGGGGTAGGTGCACCTGAGTATGTGGCCTCC |
| | GTGGCCGATGAAGAAGGCATTGTGGATTTTATGACTCTC |
| | ACAGCGGAGTCCGGCGCTATCGGTGGCGTTCCAGCCGGC |
| | GGTGTTCGCTTTGGGGCGAGCTACAATGCTGACGCCTTG |
| | ATCGACCAGGGCTACCAATTTGATTATTACGACGGTGGG |
| | GGTCTGGATCTTTGTTACCTGGGTTTAGCTGAATGCGACG |
| | AAAAGGGTAATATCAATGTTAGCCGCTTCGGTCCTCGTA |
| | TCGCTGGGTGCGGCGGATTCATTAACATTACCCAAAACA |
| | CGCCGAAAGTCTTCTTTTGTGGGACCTTTACAGCCGGGG |
| | GGCTGAAAGTGAAAATTGAAGATGGTAAGGTGATTATCG |
| | TTCAGGAAGGGAAACAGAAGAAATTCCTTAAGGCAGTG |
| | GAGCAAATCACCTTTAATGGAGACGTGGCCTTAGCGAAC |
| | AAGCAACAAGTTACCTACATCACGGAGCGTTGCGTCTTC |
| | CTCCTCAAAGAAGACGGTTTACACCTTTCGGAAATCGCG |
| | CCAGGCATCGATCTGCAGACCCAGATTTTGGATGTTATG |
| | GACTTTGCCCCGATCATTGATCGTGACGCAAACGGGCAG |
| | ATTAAACTGATGGACGCGGCGTTATTCGCAGAAGGGCTG |
| | ATGGGCTTGAAAGAAATGAAGTCTTGAtaagaaggagatatacatA |
| | TGAGCTTAACCCAAGGCATGAAAGCTAAACAACTGTTAG |
| | CATACTTTCAGGGTAAAGCCGATCAGGATGCACGTGAAG |
| | CGAAAGCCCGCGGTGAGCTGGTCTGCTGGTCGGCGTCAG |
| | TCGCGCCGCCGGAATTTTGCGTAACAATGGGCATTGCCA |
| | TGATCTACCCGGAGACTCATGCAGCGGGCATCGGTGCCC |
| | GCAAAGGTGCGATGGACATGCTGGAAGTTGCGGACCGC |
| | AAAGGCTACAACGTGGATTGTTGTTCCTACGGCCGTGTA |
| | AATATGGGTTACATGGAATGTTTAAAAGAAGCCGCCATC |
| | ACGGGCGTCAAGCCGGAAGTTTTGGTTAATTCCCCTGCT |
| | GCTGACGTTCCGCTTCCCGATTTGGTGATTACGTGTAATA |
| | ATATCTGTAACACGCTGCTGAAATGGTACGAAAACTTAG |
| | CAGCAGAACTCGATATTCCTTGCATCGTGATCGACGTAC |
| | CGTTTAATCATACCATGCCGATTCCGGAATATGCCAAGG |
| | CCTACATCGCGGACCAGTTCCGCAATGCAATTTCTCAGC |
| | TGGAAGTTATTTGTGGCCGTCCGTTCGATTGGAAGAAAT |
| | TTAAGGAGGTCAAAGATCAGACCCAGCGTAGCGTATACC |
| | ACTGGAACCGCATTGCCGAGATGGCGAAATACAAGCCTA |
| | GCCCGCTGAACGGCTTCGATCTGTTCAATTACATGGCGTT |
| | AATCGTGGCGTGCCGCAGCCTGGATTATGCAGAAATTAC |
| | CTTTAAAGCGTTCGCGGACGAATTAGAAGAGAATTTGAA |
| | GGCGGGTATCTACGCCTTTAAAGGTGCGGAAAAAACGCG |
| | CTTTCAATGGGAAGGTATCGCGGTGTGGCCACATTTAGG |
| | TCACACGTTTAAATCTATGAAGAATCTGAATTCGATTAT |
| | GACCGGTACGGCATACCCCGCCCTTTGGGACCTGCACTA |
| | TGACGCTAACGACGAATCTATGCACTCTATGGCTGAAGC |
| | GTACACCCGTATTTATATTAATACTTGTCTGCAGAACAA |
| | AGTAGAGGTCCTGCTTGGGATCATGGAAAAAGGCCAGGT |
| | GGATGGTACCGTATATCATCTGAATCGCAGCTGCAAACT |
| | GATGAGTTTCCTGAACGTGGAAACGGCTGAAATTATTAA |
| | AGAGAAGAACGGTCTTCCTTACGTCTCCATTGATGGCGA |
| | TCAGACCGATCCTCGCGTTTTTTCTCCGGCCCAGTTTGAT |
| | ACCCGTGTTCAGGCCCTGGTTGAGATGATGGAGGCCAAT |
| | ATGGCGGCAGCGGAATAAtaagaaggagatatacatATGTCACGC |
| | GTGGAGGCAATCCTGTCGCAGCTGAAAGATGTCGCCGCG |
| | AATCCGAAAAAAGCCATGGATGACTATAAAGCTGAAAC |
| | AGGTAAGGGCGCGGTTGGTATCATGCCGATCTACAGCCC |
| | CGAAGAAATGGTACACGCCGCTGGCTATTTGCCGATGGG |
| | AATCTGGGGCGCCCAGGGCAAAACGATTAGTAAAGCGC |
| | GCACCTATCTGCCTGCTTTTGCCTGCAGCGTAATGCAGCA |
| | GGTTATGGAATTACAGTGCGAGGGCGCGTATGATGACCT |
| | GTCCGCAGTTATTTTTAGCGTACCGTGCGACACTCTCAAA |
| | TGTCTTAGCCAGAAATGGAAAGGTACGTCCCCAGTGATT |
| | GTATTTACGCATCCGCAGAACCGCGGATTAGAAGCGGCG |
| | AACCAATTCTTGGTTACCGAGTATGAACTGGTAAAAGCA |
| | CAACTGGAATCAGTTCTGGGTGTGAAAATTTCAAACGCC |
| | GCCCTGGAAAATTCGATTGCAATTTATAACGAGAATCGT |
| | GCCGTGATGCGTGAGTTCGTGAAAGTGGCAGCGGACTAT |
| | CCTCAAGTCATTGACGCAGTGAGCCGCCACGCGGTTTTT |
| | AAAGCGCGCCAGTTTATGCTTAAGGAAAAACATACCGCA |
| | CTTGTGAAAGAACTGATCGCTGAGATTAAAGCAACGCCA |
| | GTCCAGCCGTGGGACGGAAAAAAGGTTGTAGTGACGGG |
| | CATTCTGTTGGAACCGAATGAGTTATTAGATATCTTTAAT |
| | GAGTTTAAGATCGCGATTGTTGATGATGATTTAGCGCAG |
| | GAAAGCCGTCAGATCCGTGTTGACGTTCTGGACGGAGAA |
| | GGCGGACCGCTCTACCGTATGGCTAAAGCGTGGCAGCAA |
| | ATGTATGGCTGCTCGCTGGCAACCGACACCAAGAAGGGT |
| | CGCGGCCGTATGTTAATTAACAAAACGATTCAGACCGGT |
| | GCGGACGCTATCGTAGTTGCAATGATGAAGTTTTGCGAC |
| | CCAGAAGAATGGGATTATCCGGTAATGTACCGTGAATTT |
| | GAAGAAAAAGGGGTCAAATCACTTATGATTGAGGTGGA |
| | TCAGGAAGTATCGTCTTTCGAACAGATTAAAACCCGTCT |
| | GCAGTCATTCGTCGAAATGCTTTAAtaagaaggagatatacatATG |
| | TATACCTTGGGGATTGATGTCGGTTCTGCCTCTAGTAAAG |
| | CGGTGATTCTGAAAGATGGAAAAGATATTGTCGCTGCCG |
| | AGGTTGTCCAAGTCGGTACCGGCTCCTCGGGTCCCCAAC |
| | GCGCACTGGACAAAGCCTTTGAAGTCTCTGGCTTAAAAA |
| | AGGAAGACATCAGCTACACAGTAGCTACGGGCTATGGG |
| | CGCTTCAATTTTAGCGACGCGGATAAACAGATTTCGGAA |
| | ATTAGCTGTCATGCCAAAGGCATTTATTTCTTAGTACCAA |
| | CTGCGCGCACTATTATTGACATTGGCGGCCAAGATGCGA |
| | AAGCCATCCGCCTGGACGACAAGGGGGGTATTAAGCAA |
| | TTCTTCATGAATGATAAATGCGCGGCGGGCACGGGGCGT |
| | TTCCTGGAAGTCATGGCTCGCGTACTTGAAACCACCCTG |
| | GATGAAATGGCTGAACTGGATGAACAGGCGACTGACAC |
| | CGCTCCCATTTCAAGCACCTGCACGGTTTTCGCCGAAAG |
| | CGAAGTAATTAGCCAATTGAGCAATGGTGTCTCACGCAA |
| | CAACATCATTAAAGGTGTCCATCTGAGCGTTGCGTCACG |
| | TGCGTGTGGTCTGGCGTATCGCGGCGGTTTGGAGAAAGA |
| | TGTTGTTATGACAGGTGGCGTGGCAAAAAATGCAGGGGT |
| | GGTGCGCGCGGTGGCGGGCGTTCTGAAGACCGATGTTAT |
| | CGTTGCTCCGAATCCTCAGACGACCGGTGCACTGGGGGC |
| | AGCGCTGTATGCTTATGAGGCCGCCCAGAAGAAGTAAtaa |
| | gaaggagatatacatATGGCCTTCAATAGCGCAGATATTAATTCT |
| | TTCCGCGATATTTGGGTGTTTTGTGAACAGCGTGAGGGC |
| | AAACTGATTAACACCGATTTCGAATTAATTAGCGAAGGT |
| | CGTAAACTGGCTGACGAACGCGGAAGCAAACTGGTTGG |
| | AATTTTGCTGGGGCACGAAGTTGAAGAAATCGCAAAAG |
| | AATTAGGCGGCTATGGTGCGGACAAGGTAATTGTGTGCG |
| | ATCATCCGGAACTTAAATTTTACACTACGGATGCTTATGC |
| | CAAAGTTTTATGTGACGTCGTGATGGAAGAGAAACCGGA |
| | GGTAATTTTGATCGGTGCCACCAACATTGGCCGTGATCT |
| | CGGACCGCGTTGTGCTGCACGCTTGCACACGGGGCTGAC |
| | GGCTGATTGCACGCACCTGGATATTGATATGAATAAATA |
| | TGTGGACTTTCTTAGCACCAGTAGCACCTTGGATATCTCG |
| | TCGATGACTTTCCCTATGGAAGATACAAACCTTAAAATG |
| | ACGCGCCCTGCATTTGGCGGACATCTGATGGCAACGATC |
| | ATTTGTCCACGCTTCCGTCCCTGTATGAGCACAGTGCGCC |
| | CCGGAGTGATGAAGAAAGCGGAGTTCTCGCAGGAGATG |
| | GCGCAAGCATGTCAAGTAGTGACCCGTCACGTAAATTTG |
| | TCGGATGAAGACCTTAAAACTAAAGTAATTAATATCGTG |
| | AAGGAAACGAAAAAGATTGTGGATCTGATCGGCGCAGA |
| | AATTATTGTGTCAGTTGGTCGTGGTATCTCGAAAGATGTC |
| | CAAGGTGGAATTGCACTGGCTGAAAAACTTGCGGACGCA |
| | TTTGGTAACGGTGTCGTGGGCGGCTCGCGCGCAGTGATT |
| | GATTCCGGCTGGTTACCTGCGGATCATCAGGTTGGACAA |
| | ACCGGTAAGACCGTGCACCCGAAAGTCTACGTGGCGCTG |
| | GGTATTAGTGGGGCTATCCAGCATAAGGCTGGGATGCAA |
| | GACTCTGAACTGATCATTGCCGTCAACAAAGACGAAACG |
| | GCGCCTATCTTCGACTGCGCCGATTATGGCATCACCGGT |
| | GATTTATTTAAAATCGTACCGATGATGATCGACGCGATC |
| | AAAGAGGGTAAAAACGCATGAtaagaaggagatatacatATGCGC |
| | ATCTATGTGTGTGTGAAACAAGTCCCAGATACGAGCGGC |
| | AAGGTGGCCGTTAACCCTGATGGGACCCTTAACCGTGCC |
| | TCAATGGCAGCGATTATTAACCCGGACGATATGTCCGCG |
| | ATCGAACAGGCATTAAAACTGAAAGATGAAACCGGATG |
| | CCAGGTTACGGCGCTTACGATGGGTCCTCCTCCTGCCGA |
| | GGGCATGTTGCGCGAAATTATTGCAATGGGGGCCGACGA |
| | TGGTGTGCTGATTTCGGCCCGTGAATTTGGGGGGTCCGA |
| | TACCTTCGCAACCAGTCAAATTATTAGCGCGGCAATCCA |
| | TAAATTAGGCTTAAGCAATGAAGACATGATCTTTTGCGG |
| | TCGTCAGGCCATTGACGGTGATACGGCCCAAGTCGGCCC |
| | TCAAATTGCCGAAAAACTGAGCATCCCACAGGTAACCTA |
| | TGGCGCAGGAATCAAAAAATCTGGTGATTTAGTGCTGGT |
| | GAAGCGTATGTTGGAGGATGGTTATATGATGATCGAAGT |
| | CGAAACTCCATGTCTGATTACCTGCATTCAGGATAAAGC |
| | GGTAAAACCACGTTACATGACTCTCAACGGTATTATGGA |
| | ATGCTACTCCAAGCCGCTCCTCGTTCTCGATTACGAAGC |
| | ACTGAAAGATGAACCGCTGATCGAACTTGATACCATTGG |
| | GCTTAAAGGCTCCCCGACGAATATCTTTAAATCGTTTAC |
| | GCCGCCTCAGAAAGGCGTTGGTGTCATGCTCCAAGGCAC |
| | CGATAAGGAAAAAGTCGAGGATCTGGTGGATAAGCTGA |
| | TGCAGAAACATGTCATCTAAtaagaaggagatatacatATGTTCTT |
| | ACTGAAGATTAAAAAAGAACGTATGAAACGCATGGACT |
| | TTAGTTTAACGCGTGAACAGGAGATGTTAAAAAAACTGG |
| | CGCGTCAGTTTGCTGAGATCGAGCTGGAACCGGTGGCCG |
| | AAGAGATTGATCGTGAGCACGTTTTTCCTGCAGAAAACT |
| | TTAAGAAGATGGCGGAAATTGGCTTAACCGGCATTGGTA |
| | TCCCGAAAGAATTTGGTGGCTCCGGTGGAGGCACCCTGG |
| | AGAAGGTCATTGCCGTGTCAGAATTCGGCAAAAAGTGTA |
| | TGGCCTCAGCTTCCATTTTAAGCATTCATCTTATCGCGCC |
| | GCAGGCAATCTACAAATATGGGACCAAAGAACAGAAAG |
| | AGACGTACCTGCCGCGTCTTACCAAAGGTGGTGAACTGG |
| | GCGCCTTTGCGCTGACAGAACCAAACGCCGGAAGCGATG |
| | CCGGCGCGGTAAAAACGACCGCGATTCTGGACAGCCAG |
| | ACAAACGAGTACGTGCTGAATGGCACCAAATGCTTTATC |
| | AGCGGGGGCGGGCGCGCGGGTGTTCTTGTAATTTTTGCG |
| | CTTACTGAACCGAAAAAAGGTCTGAAAGGGATGAGCGC |
| | GATTATCGTGGAGAAAGGGACCCCGGGCTTCAGCATCGG |
| | CAAGGTGGAGAGCAAGATGGGGATCGCAGGTTCGGAAA |
| | CCGCGGAACTTATCTTCGAAGATTGTCGCGTTCCGGCTG |
| | CCAACCTTTTAGGTAAAGAAGGCAAAGGCTTTAAAATTG |
| | CTATGGAAGCCCTGGATGGCGCCCGTATTGGCGTGGGCG |
| | CTCAAGCAATCGGAATTGCCGAGGGGGCGATCGACCTGA |
| | GTGTGAAGTACGTTCACGAGCGCATTCAATTTGGTAAAC |
| | CGATCGCGAATCTGCAGGGAATTCAATGGTATATCGCGG |
| | ATATGGCGACCAAAACCGCCGCGGCACGCGCACTTGTTG |
| | AGTTTGCAGCGTATCTTGAAGACGCGGGTAAACCGTTCA |
| | CAAAGGAATCTGCTATGTGCAAGCTGAACGCCTCCGAAA |
| | ACGCGCGTTTTGTGACAAATTTAGCTCTGCAGATTCACG |
| | GGGGTTACGGTTATATGAAAGATTATCCGTTAGAGCGTA |
| | TGTATCGCGATGCTAAGATTACGGAAATTTACGAGGGGA |
| | CATCAGAAATCCATAAGGTGGTGATTGCGCGTGAAGTAA |
| | TGAAACGCTAA |
| pct-lcdABC- | ATGCGCAAAGTGCCGATTATCACGGCTGACGAGGCCGCA |
| acrABC | AAACTGATCAAGGACGGCGACACCGTGACAACTAGCGG |
| (ribosome | CTTTGTGGGTAACGCGATCCCTGAGGCCCTTGACCGTGC |
| binding sites: | AGTCGAAAAGCGTTTCCTGGAAACGGGCGAACCGAAGA |
| lower case | ACATTACTTATGTATATTGCGGCAGTCAGGGCAATCGCG |
| underlined; | ACGGTCGTGGCGCAGAACATTTCGCGCATGAAGGCCTGC |
| coding | TGAAACGTTATATCGCTGGCCATTGGGCGACCGTCCCGG |
| regions: upper | CGTTAGGGAAAATGGCCATGGAGAATAAAATGGAGGCC |
| case) (SEQ ID | TACAATGTCTCTCAGGGCGCCTTGTGTCATCTCTTTCGCG |
| NO: 240) | ATATTGCGAGCCATAAACCGGGTGTGTTCACGAAAGTAG |
| | GAATCGGCACCTTCATTGATCCACGTAACGGTGGTGGGA |
| | AGGTCAACGATATTACCAAGGAAGATATCGTAGAACTGG |
| | TGGAAATTAAAGGGCAGGAATACCTGTTTTATCCGGCGT |
| | TCCCGATCCATGTCGCGCTGATTCGTGGCACCTATGCGG |
| | ACGAGAGTGGTAACATCACCTTTGAAAAAGAGGTAGCG |
| | CCTTTGGAAGGGACTTCTGTCTGTCAAGCGGTGAAGAAC |
| | TCGGGTGGCATTGTCGTGGTTCAGGTTGAGCGTGTCGTC |
| | AAAGCAGGCACGCTGGATCCGCGCCATGTGAAAGTTCCG |
| | GGTATCTATGTAGATTACGTAGTCGTCGCGGATCCGGAG |
| | GACCATCAACAGTCCCTTGACTGCGAATATGATCCTGCC |
| | CTTAGTGGAGAGCACCGTCGTCCGGAGGTGGTGGGTGAA |
| | CCACTGCCTTTATCCGCGAAGAAAGTCATCGGCCGCCGT |
| | GGCGCGATTGAGCTCGAGAAAGACGTTGCAGTGAACCTT |
| | GGGGTAGGTGCACCTGAGTATGTGGCCTCCGTGGCCGAT |
| | GAAGAAGGCATTGTGGATTTTATGACTCTCACAGCGGAG |
| | TCCGGCGCTATCGGTGGCGTTCCAGCCGGCGGTGTTCGC |
| | TTTGGGGCGAGCTACAATGCTGACGCCTTGATCGACCAG |
| | GGCTACCAATTTGATTATTACGACGGTGGGGGTCTGGAT |
| | CTTTGTTACCTGGGTTTAGCTGAATGCGACGAAAAGGGT |
| | AATATCAATGTTAGCCGCTTCGGTCCTCGTATCGCTGGGT |
| | GCGGCGGATTCATTAACATTACCCAAAACACGCCGAAAG |
| | TCTTCTTTTGTGGGACCTTTACAGCCGGGGGGCTGAAAG |
| | TGAAAATTGAAGATGGTAAGGTGATTATCGTTCAGGAAG |
| | GGAAACAGAAGAAATTCCTTAAGGCAGTGGAGCAAATC |
| | ACCTTTAATGGAGACGTGGCCTTAGCGAACAAGCAACAA |
| | GTTACCTACATCACGGAGCGTTGCGTCTTCCTCCTCAAAG |
| | AAGACGGTTTACACCTTTCGGAAATCGCGCCAGGCATCG |
| | ATCTGCAGACCCAGATTTTGGATGTTATGGACTTTGCCCC |
| | GATCATTGATCGTGACGCAAACGGGCAGATTAAACTGAT |
| | GGACGCGGCGTTATTCGCAGAAGGGCTGATGGGCTTGAA |
| | AGAAATGAAGTCTTGAtaagaaggagatatacatATGAGCTTAACC |
| | CAAGGCATGAAAGCTAAACAACTGTTAGCATACTTTCAG |
| | GGTAAAGCCGATCAGGATGCACGTGAAGCGAAAGCCCG |
| | CGGTGAGCTGGTCTGCTGGTCGGCGTCAGTCGCGCCGCC |
| | GGAATTTTGCGTAACAATGGGCATTGCCATGATCTACCC |
| | GGAGACTCATGCAGCGGGCATCGGTGCCCGCAAAGGTG |
| | CGATGGACATGCTGGAAGTTGCGGACCGCAAAGGCTAC |
| | AACGTGGATTGTTGTTCCTACGGCCGTGTAAATATGGGT |
| | TACATGGAATGTTTAAAAGAAGCCGCCATCACGGGCGTC |
| | AAGCCGGAAGTTTTGGTTAATTCCCCTGCTGCTGACGTTC |
| | CGCTTCCCGATTTGGTGATTACGTGTAATAATATCTGTAA |
| | CACGCTGCTGAAATGGTACGAAAACTTAGCAGCAGAACT |
| | CGATATTCCTTGCATCGTGATCGACGTACCGTTTAATCAT |
| | ACCATGCCGATTCCGGAATATGCCAAGGCCTACATCGCG |
| | GACCAGTTCCGCAATGCAATTTCTCAGCTGGAAGTTATTT |
| | GTGGCCGTCCGTTCGATTGGAAGAAATTTAAGGAGGTCA |
| | AAGATCAGACCCAGCGTAGCGTATACCACTGGAACCGCA |
| | TTGCCGAGATGGCGAAATACAAGCCTAGCCCGCTGAACG |
| | GCTTCGATCTGTTCAATTACATGGCGTTAATCGTGGCGTG |
| | CCGCAGCCTGGATTATGCAGAAATTACCTTTAAAGCGTT |
| | CGCGGACGAATTAGAAGAGAATTTGAAGGCGGGTATCT |
| | ACGCCTTTAAAGGTGCGGAAAAAACGCGCTTTCAATGGG |
| | AAGGTATCGCGGTGTGGCCACATTTAGGTCACACGTTTA |
| | AATCTATGAAGAATCTGAATTCGATTATGACCGGTACGG |
| | CATACCCCGCCCTTTGGGACCTGCACTATGACGCTAACG |
| | ACGAATCTATGCACTCTATGGCTGAAGCGTACACCCGTA |
| | TTTATATTAATACTTGTCTGCAGAACAAAGTAGAGGTCC |
| | TGCTTGGGATCATGGAAAAAGGCCAGGTGGATGGTACCG |
| | TATATCATCTGAATCGCAGCTGCAAACTGATGAGTTTCCT |
| | GAACGTGGAAACGGCTGAAATTATTAAAGAGAAGAACG |
| | GTCTTCCTTACGTCTCCATTGATGGCGATCAGACCGATCC |
| | TCGCGTTTTTTCTCCGGCCCAGTTTGATACCCGTGTTCAG |
| | GCCCTGGTTGAGATGATGGAGGCCAATATGGCGGCAGCG |
| | GAATAAtaagaaggagatatacatATGTCACGCGTGGAGGCAATCC |
| | TGTCGCAGCTGAAAGATGTCGCCGCGAATCCGAAAAAA |
| | GCCATGGATGACTATAAAGCTGAAACAGGTAAGGGCGC |
| | GGTTGGTATCATGCCGATCTACAGCCCCGAAGAAATGGT |
| | ACACGCCGCTGGCTATTTGCCGATGGGAATCTGGGGCGC |
| | CCAGGGCAAAACGATTAGTAAAGCGCGCACCTATCTGCC |
| | TGCTTTTGCCTGCAGCGTAATGCAGCAGGTTATGGAATT |
| | ACAGTGCGAGGGCGCGTATGATGACCTGTCCGCAGTTAT |
| | TTTTAGCGTACCGTGCGACACTCTCAAATGTCTTAGCCAG |
| | AAATGGAAAGGTACGTCCCCAGTGATTGTATTTACGCAT |
| | CCGCAGAACCGCGGATTAGAAGCGGCGAACCAATTCTTG |
| | GTTACCGAGTATGAACTGGTAAAAGCACAACTGGAATCA |
| | GTTCTGGGTGTGAAAATTTCAAACGCCGCCCTGGAAAAT |
| | TCGATTGCAATTTATAACGAGAATCGTGCCGTGATGCGT |
| | GAGTTCGTGAAAGTGGCAGCGGACTATCCTCAAGTCATT |
| | GACGCAGTGAGCCGCCACGCGGTTTTTAAAGCGCGCCAG |
| | TTTATGCTTAAGGAAAAACATACCGCACTTGTGAAAGAA |
| | CTGATCGCTGAGATTAAAGCAACGCCAGTCCAGCCGTGG |
| | GACGGAAAAAAGGTTGTAGTGACGGGCATTCTGTTGGAA |
| | CCGAATGAGTTATTAGATATCTTTAATGAGTTTAAGATC |
| | GCGATTGTTGATGATGATTTAGCGCAGGAAAGCCGTCAG |
| | ATCCGTGTTGACGTTCTGGACGGAGAAGGCGGACCGCTC |
| | TACCGTATGGCTAAAGCGTGGCAGCAAATGTATGGCTGC |
| | TCGCTGGCAACCGACACCAAGAAGGGTCGCGGCCGTATG |
| | TTAATTAACAAAACGATTCAGACCGGTGCGGACGCTATC |
| | GTAGTTGCAATGATGAAGTTTTGCGACCCAGAAGAATGG |
| | GATTATCCGGTAATGTACCGTGAATTTGAAGAAAAAGGG |
| | GTCAAATCACTTATGATTGAGGTGGATCAGGAAGTATCG |
| | TCTTTCGAACAGATTAAAACCCGTCTGCAGTCATTCGTCG |
| | AAATGCTTTAAtaagaaggagatatacatATGTATACCTTGGGGAT |
| | TGATGTCGGTTCTGCCTCTAGTAAAGCGGTGATTCTGAA |
| | AGATGGAAAAGATATTGTCGCTGCCGAGGTTGTCCAAGT |
| | CGGTACCGGCTCCTCGGGTCCCCAACGCGCACTGGACAA |
| | AGCCTTTGAAGTCTCTGGCTTAAAAAAGGAAGACATCAG |
| | CTACACAGTAGCTACGGGCTATGGGCGCTTCAATTTTAG |
| | CGACGCGGATAAACAGATTTCGGAAATTAGCTGTCATGC |
| | CAAAGGCATTTATTTCTTAGTACCAACTGCGCGCACTATT |
| | ATTGACATTGGCGGCCAAGATGCGAAAGCCATCCGCCTG |
| | GACGACAAGGGGGGTATTAAGCAATTCTTCATGAATGAT |
| | AAATGCGCGGCGGGCACGGGGCGTTTCCTGGAAGTCATG |
| | GCTCGCGTACTTGAAACCACCCTGGATGAAATGGCTGAA |
| | CTGGATGAACAGGCGACTGACACCGCTCCCATTTCAAGC |
| | ACCTGCACGGTTTTCGCCGAAAGCGAAGTAATTAGCCAA |
| | TTGAGCAATGGTGTCTCACGCAACAACATCATTAAAGGT |
| | GTCCATCTGAGCGTTGCGTCACGTGCGTGTGGTCTGGCG |
| | TATCGCGGCGGTTTGGAGAAAGATGTTGTTATGACAGGT |
| | GGCGTGGCAAAAAATGCAGGGGTGGTGCGCGCGGTGGC |
| | GGGCGTTCTGAAGACCGATGTTATCGTTGCTCCGAATCC |
| | TCAGACGACCGGTGCACTGGGGGCAGCGCTGTATGCTTA |
| | TGAGGCCGCCCAGAAGAAGTAAtaagaaggagatatacatATGGC |
| | CTTCAATAGCGCAGATATTAATTCTTTCCGCGATATTTGG |
| | GTGTTTTGTGAACAGCGTGAGGGCAAACTGATTAACACC |
| | GATTTCGAATTAATTAGCGAAGGTCGTAAACTGGCTGAC |
| | GAACGCGGAAGCAAACTGGTTGGAATTTTGCTGGGGCAC |
| | GAAGTTGAAGAAATCGCAAAAGAATTAGGCGGCTATGG |
| | TGCGGACAAGGTAATTGTGTGCGATCATCCGGAACTTAA |
| | ATTTTACACTACGGATGCTTATGCCAAAGTTTTATGTGAC |
| | GTCGTGATGGAAGAGAAACCGGAGGTAATTTTGATCGGT |
| | GCCACCAACATTGGCCGTGATCTCGGACCGCGTTGTGCT |
| | GCACGCTTGCACACGGGGCTGACGGCTGATTGCACGCAC |
| | CTGGATATTGATATGAATAAATATGTGGACTTTCTTAGC |
| | ACCAGTAGCACCTTGGATATCTCGTCGATGACTTTCCCTA |
| | TGGAAGATACAAACCTTAAAATGACGCGCCCTGCATTTG |
| | GCGGACATCTGATGGCAACGATCATTTGTCCACGCTTCC |
| | GTCCCTGTATGAGCACAGTGCGCCCCGGAGTGATGAAGA |
| | AAGCGGAGTTCTCGCAGGAGATGGCGCAAGCATGTCAA |
| | GTAGTGACCCGTCACGTAAATTTGTCGGATGAAGACCTT |
| | AAAACTAAAGTAATTAATATCGTGAAGGAAACGAAAAA |
| | GATTGTGGATCTGATCGGCGCAGAAATTATTGTGTCAGT |
| | TGGTCGTGGTATCTCGAAAGATGTCCAAGGTGGAATTGC |
| | ACTGGCTGAAAAACTTGCGGACGCATTTGGTAACGGTGT |
| | CGTGGGCGGCTCGCGCGCAGTGATTGATTCCGGCTGGTT |
| | ACCTGCGGATCATCAGGTTGGACAAACCGGTAAGACCGT |
| | GCACCCGAAAGTCTACGTGGCGCTGGGTATTAGTGGGGC |
| | TATCCAGCATAAGGCTGGGATGCAAGACTCTGAACTGAT |
| | CATTGCCGTCAACAAAGACGAAACGGCGCCTATCTTCGA |
| | CTGCGCCGATTATGGCATCACCGGTGATTTATTTAAAATC |
| | GTACCGATGATGATCGACGCGATCAAAGAGGGTAAAAA |
| | CGCATGAtaagaaggagatatacatATGCGCATCTATGTGTGTGTG |
| | AAACAAGTCCCAGATACGAGCGGCAAGGTGGCCGTTAA |
| | CCCTGATGGGACCCTTAACCGTGCCTCAATGGCAGCGAT |
| | TATTAACCCGGACGATATGTCCGCGATCGAACAGGCATT |
| | AAAACTGAAAGATGAAACCGGATGCCAGGTTACGGCGC |
| | TTACGATGGGTCCTCCTCCTGCCGAGGGCATGTTGCGCG |
| | AAATTATTGCAATGGGGGCCGACGATGGTGTGCTGATTT |
| | CGGCCCGTGAATTTGGGGGGTCCGATACCTTCGCAACCA |
| | GTCAAATTATTAGCGCGGCAATCCATAAATTAGGCTTAA |
| | GCAATGAAGACATGATCTTTTGCGGTCGTCAGGCCATTG |
| | ACGGTGATACGGCCCAAGTCGGCCCTCAAATTGCCGAAA |
| | AACTGAGCATCCCACAGGTAACCTATGGCGCAGGAATCA |
| | AAAAATCTGGTGATTTAGTGCTGGTGAAGCGTATGTTGG |
| | AGGATGGTTATATGATGATCGAAGTCGAAACTCCATGTC |
| | TGATTACCTGCATTCAGGATAAAGCGGTAAAACCACGTT |
| | ACATGACTCTCAACGGTATTATGGAATGCTACTCCAAGC |
| | CGCTCCTCGTTCTCGATTACGAAGCACTGAAAGATGAAC |
| | CGCTGATCGAACTTGATACCATTGGGCTTAAAGGCTCCC |
| | CGACGAATATCTTTAAATCGTTTACGCCGCCTCAGAAAG |
| | GCGTTGGTGTCATGCTCCAAGGCACCGATAAGGAAAAAG |
| | TCGAGGATCTGGTGGATAAGCTGATGCAGAAACATGTCA |
| | TCTAAtaagaaggagatatacatATGTTCTTACTGAAGATTAAAAA |
| | AGAACGTATGAAACGCATGGACTTTAGTTTAACGCGTGA |
| | ACAGGAGATGTTAAAAAAACTGGCGCGTCAGTTTGCTGA |
| | GATCGAGCTGGAACCGGTGGCCGAAGAGATTGATCGTG |
| | AGCACGTTTTTCCTGCAGAAAACTTTAAGAAGATGGCGG |
| | AAATTGGCTTAACCGGCATTGGTATCCCGAAAGAATTTG |
| | GTGGCTCCGGTGGAGGCACCCTGGAGAAGGTCATTGCCG |
| | TGTCAGAATTCGGCAAAAAGTGTATGGCCTCAGCTTCCA |
| | TTTTAAGCATTCATCTTATCGCGCCGCAGGCAATCTACAA |
| | ATATGGGACCAAAGAACAGAAAGAGACGTACCTGCCGC |
| | GTCTTACCAAAGGTGGTGAACTGGGCGCCTTTGCGCTGA |
| | CAGAACCAAACGCCGGAAGCGATGCCGGCGCGGTAAAA |
| | ACGACCGCGATTCTGGACAGCCAGACAAACGAGTACGT |
| | GCTGAATGGCACCAAATGCTTTATCAGCGGGGGCGGGCG |
| | CGCGGGTGTTCTTGTAATTTTTGCGCTTACTGAACCGAAA |
| | AAAGGTCTGAAAGGGATGAGCGCGATTATCGTGGAGAA |
| | AGGGACCCCGGGCTTCAGCATCGGCAAGGTGGAGAGCA |
| | AGATGGGGATCGCAGGTTCGGAAACCGCGGAACTTATCT |
| | TCGAAGATTGTCGCGTTCCGGCTGCCAACCTTTTAGGTA |
| | AAGAAGGCAAAGGCTTTAAAATTGCTATGGAAGCCCTGG |
| | ATGGCGCCCGTATTGGCGTGGGCGCTCAAGCAATCGGAA |
| | TTGCCGAGGGGGCGATCGACCTGAGTGTGAAGTACGTTC |
| | ACGAGCGCATTCAATTTGGTAAACCGATCGCGAATCTGC |
| | AGGGAATTCAATGGTATATCGCGGATATGGCGACCAAAA |
| | CCGCCGCGGCACGCGCACTTGTTGAGTTTGCAGCGTATC |
| | TTGAAGACGCGGGTAAACCGTTCACAAAGGAATCTGCTA |
| | TGTGCAAGCTGAACGCCTCCGAAAACGCGCGTTTTGTGA |
| | CAAATTTAGCTCTGCAGATTCACGGGGGTTACGGTTATA |
| | TGAAAGATTATCCGTTAGAGCGTATGTATCGCGATGCTA |
| | AGATTACGGAAATTTACGAGGGGACATCAGAAATCCATA |
| | AGGTGGTGATTGCGCGTGAAGTAATGAAACGCTAA |
| Ptet-acuI-pct- | caactgttgggaagggcgatcggtgcgggcctcttcgctattacgccagctggcgaaagggg |
| lcdABC | gatgtgctgcaaggcgattaagttgggtaacgccagggttttcccagtcacgacgttgtaaaac |
| (Ptet: lower | gacggccagtgaattgacgcgtattgggatgtaaaacgacggccagtgaattcgttaagaccc |
| case; tetA/R | actttcacatttaagttgatttctaatccgcatatgatcaattcaaggccgaataagaaggctggc |
| promoter | tctgcaccttggtgatcaaataattcgatagcttgtcgtaataatggcggcatactatcagtagta |
| within Ptet: | ggtgtttccctttcttctttagcgacttgatgctcttgatcttccaatacgcaacctaaagtaaaatg |
| lower case | ccccacagcgctgagtgcatataatgcattctctagtgaaaaaccttgaggcataaaaaggcta |
| bold, with tet | attgattttcgagagtttcatactgatttctgtaggccgtgtacctaaatgtacttttgctccatcgc |
| operator | gatgacttagtaaagcacatctaaaacttttagcgttattacgtaaaaaatcttgccagctttcccc |
| underlined; | ttctaaagggcaaaagtgagtatggtgcctatctaacatctcaatggctaaggcgtcgagcaaa |
| RBS and | gcccgcttattttttacatgccaatacaatgtaggctgctctacacctagcttctgggcgagtttac |
| leader region | gggttgttaaaccttcgattccgacctcattaagcagctctaatgcgctgttaatcactttacttttat |
| lower case | ctaatctagacatcattaattcctaatttttgttgacactctatcattgatagagttattttaccac |
| italic; | tccctatcagtgatagagaaaagtgaactctagaaataattttgtttaactttaagaaggaga |
| ribosome | tatacatATGCGTGCGGTACTGATCGAGAAGTCCGATGATAC |
| binding site: | ACAGTCCGTCTCTGTCACCGAACTGGCTGAAGATCAACT |
| lower case | GCCGGAAGGCGACGTTTTGGTAGATGTTGCTTATTCAAC |
| underlined | ACTGAACTACAAAGACGCCCTGGCAATTACCGGTAAAGC |
| italic; coding | CCCCGTCGTTCGTCGTTTTCCGATGGTACCTGGAATCGAC |
| region: upper | TTTACGGGTACCGTGGCCCAGTCTTCCCACGCCGACTTCA |
| case, rrnB T1 | AGCCAGGTGATCGCGTAATCCTGAATGGTTGGGGTGTGG |
| and T2 | GGGAAAAACATTGGGGCGGTTTAGCGGAGCGCGCTCGC |
| terminors: | GTGCGCGGAGACTGGCTTGTTCCCTTGCCAGCCCCCCTG |
| lower case | GACTTACGCCAAGCGGCCATGATCGGTACAGCAGGATAC |
| bold underline | ACGGCGATGTTGTGCGTTCTGGCGCTTGAACGTCACGGA |
| italics) (SEQ | GTGGTGCCGGGTAATGGGGAAATCGTGGTGTCCGGTGCA |
| ID NO: 241) | GCAGGCGGCGTCGGCTCCGTTGCGACGACCCTTCTTGCC |
| | GCTAAGGGCTATGAGGTAGCGGCAGTGACTGGACGTGC |
| | GTCCGAAGCAGAATATCTGCGCGGTTTGGGGGCGGCGAG |
| | CGTAATTGATCGTAACGAATTAACGGGGAAGGTACGCCC |
| | GCTGGGTCAGGAGCGTTGGGCTGGCGGGATTGACGTGGC |
| | GGGATCAACCGTGCTTGCGAACATGCTTTCTATGATGAA |
| | GTATCGCGGGGTAGTCGCTGCGTGTGGCCTGGCCGCGGG |
| | CATGGATCTGCCCGCGTCTGTCGCGCCCTTTATTCTTCGT |
| | GGGATGACGCTGGCAGGGGTGGATAGCGTTATGTGCCCA |
| | AAGACAGATCGTTTAGCAGCGTGGGCCCGTTTGGCGTCA |
| | GATCTTGACCCTGCCAAGCTGGAGGAGATGACTACAGAG |
| | TTGCCGTTTAGTGAAGTAATCGAGACAGCACCCAAATTC |
| | TTGGACGGGACGGTTCGTGGCCGCATTGTTATCCCCGTA |
| | ACGCCCTAAgaactctagaaataattttgtttaactttaagaaggagatatacatAT |
| | GCGCAAAGTGCCGATTATCACGGCTGACGAGGCCGCAA |
| | AACTGATCAAGGACGGCGACACCGTGACAACTAGCGGC |
| | TTTGTGGGTAACGCGATCCCTGAGGCCCTTGACCGTGCA |
| | GTCGAAAAGCGTTTCCTGGAAACGGGCGAACCGAAGAA |
| | CATTACTTATGTATATTGCGGCAGTCAGGGCAATCGCGA |
| | CGGTCGTGGCGCAGAACATTTCGCGCATGAAGGCCTGCT |
| | GAAACGTTATATCGCTGGCCATTGGGCGACCGTCCCGGC |
| | GTTAGGGAAAATGGCCATGGAGAATAAAATGGAGGCCT |
| | ACAATGTCTCTCAGGGCGCCTTGTGTCATCTCTTTCGCGA |
| | TATTGCGAGCCATAAACCGGGTGTGTTCACGAAAGTAGG |
| | AATCGGCACCTTCATTGATCCACGTAACGGTGGTGGGAA |
| | GGTCAACGATATTACCAAGGAAGATATCGTAGAACTGGT |
| | GGAAATTAAAGGGCAGGAATACCTGTTTTATCCGGCGTT |
| | CCCGATCCATGTCGCGCTGATTCGTGGCACCTATGCGGA |
| | CGAGAGTGGTAACATCACCTTTGAAAAAGAGGTAGCGCC |
| | TTTGGAAGGGACTTCTGTCTGTCAAGCGGTGAAGAACTC |
| | GGGTGGCATTGTCGTGGTTCAGGTTGAGCGTGTCGTCAA |
| | AGCAGGCACGCTGGATCCGCGCCATGTGAAAGTTCCGGG |
| | TATCTATGTAGATTACGTAGTCGTCGCGGATCCGGAGGA |
| | CCATCAACAGTCCCTTGACTGCGAATATGATCCTGCCCTT |
| | AGTGGAGAGCACCGTCGTCCGGAGGTGGTGGGTGAACC |
| | ACTGCCTTTATCCGCGAAGAAAGTCATCGGCCGCCGTGG |
| | CGCGATTGAGCTCGAGAAAGACGTTGCAGTGAACCTTGG |
| | GGTAGGTGCACCTGAGTATGTGGCCTCCGTGGCCGATGA |
| | AGAAGGCATTGTGGATTTTATGACTCTCACAGCGGAGTC |
| | CGGCGCTATCGGTGGCGTTCCAGCCGGCGGTGTTCGCTT |
| | TGGGGCGAGCTACAATGCTGACGCCTTGATCGACCAGGG |
| | CTACCAATTTGATTATTACGACGGTGGGGGTCTGGATCTT |
| | TGTTACCTGGGTTTAGCTGAATGCGACGAAAAGGGTAAT |
| | ATCAATGTTAGCCGCTTCGGTCCTCGTATCGCTGGGTGCG |
| | GCGGATTCATTAACATTACCCAAAACACGCCGAAAGTCT |
| | TCTTTTGTGGGACCTTTACAGCCGGGGGGCTGAAAGTGA |
| | AAATTGAAGATGGTAAGGTGATTATCGTTCAGGAAGGGA |
| | AACAGAAGAAATTCCTTAAGGCAGTGGAGCAAATCACCT |
| | TTAATGGAGACGTGGCCTTAGCGAACAAGCAACAAGTTA |
| | CCTACATCACGGAGCGTTGCGTCTTCCTCCTCAAAGAAG |
| | ACGGTTTACACCTTTCGGAAATCGCGCCAGGCATCGATC |
| | TGCAGACCCAGATTTTGGATGTTATGGACTTTGCCCCGAT |
| | CATTGATCGTGACGCAAACGGGCAGATTAAACTGATGGA |
| | CGCGGCGTTATTCGCAGAAGGGCTGATGGGCTTGAAAGA |
| | AATGAAGTCTTGAtaagaaggagatatacatATGAGCTTAACCCA |
| | AGGCATGAAAGCTAAACAACTGTTAGCATACTTTCAGGG |
| | TAAAGCCGATCAGGATGCACGTGAAGCGAAAGCCCGCG |
| | GTGAGCTGGTCTGCTGGTCGGCGTCAGTCGCGCCGCCGG |
| | AATTTTGCGTAACAATGGGCATTGCCATGATCTACCCGG |
| | AGACTCATGCAGCGGGCATCGGTGCCCGCAAAGGTGCG |
| | ATGGACATGCTGGAAGTTGCGGACCGCAAAGGCTACAA |
| | CGTGGATTGTTGTTCCTACGGCCGTGTAAATATGGGTTAC |
| | ATGGAATGTTTAAAAGAAGCCGCCATCACGGGCGTCAAG |
| | CCGGAAGTTTTGGTTAATTCCCCTGCTGCTGACGTTCCGC |
| | TTCCCGATTTGGTGATTACGTGTAATAATATCTGTAACAC |
| | GCTGCTGAAATGGTACGAAAACTTAGCAGCAGAACTCGA |
| | TATTCCTTGCATCGTGATCGACGTACCGTTTAATCATACC |
| | ATGCCGATTCCGGAATATGCCAAGGCCTACATCGCGGAC |
| | CAGTTCCGCAATGCAATTTCTCAGCTGGAAGTTATTTGTG |
| | GCCGTCCGTTCGATTGGAAGAAATTTAAGGAGGTCAAAG |
| | ATCAGACCCAGCGTAGCGTATACCACTGGAACCGCATTG |
| | CCGAGATGGCGAAATACAAGCCTAGCCCGCTGAACGGCT |
| | TCGATCTGTTCAATTACATGGCGTTAATCGTGGCGTGCCG |
| | CAGCCTGGATTATGCAGAAATTACCTTTAAAGCGTTCGC |
| | GGACGAATTAGAAGAGAATTTGAAGGCGGGTATCTACG |
| | CCTTTAAAGGTGCGGAAAAAACGCGCTTTCAATGGGAAG |
| | GTATCGCGGTGTGGCCACATTTAGGTCACACGTTTAAAT |
| | CTATGAAGAATCTGAATTCGATTATGACCGGTACGGCAT |
| | ACCCCGCCCTTTGGGACCTGCACTATGACGCTAACGACG |
| | AATCTATGCACTCTATGGCTGAAGCGTACACCCGTATTT |
| | ATATTAATACTTGTCTGCAGAACAAAGTAGAGGTCCTGC |
| | TTGGGATCATGGAAAAAGGCCAGGTGGATGGTACCGTAT |
| | ATCATCTGAATCGCAGCTGCAAACTGATGAGTTTCCTGA |
| | ACGTGGAAACGGCTGAAATTATTAAAGAGAAGAACGGT |
| | CTTCCTTACGTCTCCATTGATGGCGATCAGACCGATCCTC |
| | GCGTTTTTTCTCCGGCCCAGTTTGATACCCGTGTTCAGGC |
| | CCTGGTTGAGATGATGGAGGCCAATATGGCGGCAGCGG |
| | AATAAtaagaaggagatatacatATGTCACGCGTGGAGGCAATCC |
| | TGTCGCAGCTGAAAGATGTCGCCGCGAATCCGAAAAAA |
| | GCCATGGATGACTATAAAGCTGAAACAGGTAAGGGCGC |
| | GGTTGGTATCATGCCGATCTACAGCCCCGAAGAAATGGT |
| | ACACGCCGCTGGCTATTTGCCGATGGGAATCTGGGGCGC |
| | CCAGGGCAAAACGATTAGTAAAGCGCGCACCTATCTGCC |
| | TGCTTTTGCCTGCAGCGTAATGCAGCAGGTTATGGAATT |
| | ACAGTGCGAGGGCGCGTATGATGACCTGTCCGCAGTTAT |
| | TTTTAGCGTACCGTGCGACACTCTCAAATGTCTTAGCCAG |
| | AAATGGAAAGGTACGTCCCCAGTGATTGTATTTACGCAT |
| | CCGCAGAACCGCGGATTAGAAGCGGCGAACCAATTCTTG |
| | GTTACCGAGTATGAACTGGTAAAAGCACAACTGGAATCA |
| | GTTCTGGGTGTGAAAATTTCAAACGCCGCCCTGGAAAAT |
| | TCGATTGCAATTTATAACGAGAATCGTGCCGTGATGCGT |
| | GAGTTCGTGAAAGTGGCAGCGGACTATCCTCAAGTCATT |
| | GACGCAGTGAGCCGCCACGCGGTTTTTAAAGCGCGCCAG |
| | TTTATGCTTAAGGAAAAACATACCGCACTTGTGAAAGAA |
| | CTGATCGCTGAGATTAAAGCAACGCCAGTCCAGCCGTGG |
| | GACGGAAAAAAGGTTGTAGTGACGGGCATTCTGTTGGAA |
| | CCGAATGAGTTATTAGATATCTTTAATGAGTTTAAGATC |
| | GCGATTGTTGATGATGATTTAGCGCAGGAAAGCCGTCGG |
| | ATCCGTGTTGACGTTCTGGACGGAGAAGGCGGACCGCTC |
| | TACCGTATGGCTAAAGCGTGGCAGCAAATGTATGGCTGC |
| | TCGCTGGCAACCGACACCAAGAAGGGTCGCGGCCGTATG |
| | TTAATTAACAAAACGATTCAGACCGGTGCGGACGCTATC |
| | GTAGTTGCAATGATGAAGTTTTGCGACCCAGAAGAATGG |
| | GATTATCCGGTAATGTACCGTGAATTTGAAGAAAAAGGG |
| | GTCAAATCACTTATGATTGAGGTGGATCAGGAAGTATCG |
| | TCTTTCGAACAGATTAAAACCCGTCTGCAGTCATTCGTCG |
| | AAATGCTTTAAtaagaaggagatatacatATGTATACCTTGGGGAT |
| | TGATGTCGGTTCTGCCTCTAGTAAAGCGGTGATTCTGAA |
| | AGATGGAAAAGATATTGTCGCTGCCGAGGTTGTCCAAGT |
| | CGGTACCGGCTCCTCGGGTCCCCAACGCGCACTGGACAA |
| | AGCCTTTGAAGTCTCTGGCTTAAAAAAGGAAGACATCAG |
| | CTACACAGTAGCTACGGGCTATGGGCGCTTCAATTTTAG |
| | CGACGCGGATAAACAGATTTCGGAAATTAGCTGTCATGC |
| | CAAAGGCATTTATTTCTTAGTACCAACTGCGCGCACTATT |
| | ATTGACATTGGCGGCCAAGATGCGAAAGCCATCCGCCTG |
| | GACGACAAGGGGGGTATTAAGCAATTCTTCATGAATGAT |
| | AAATGCGCGGCGGGCACGGGGCGTTTCCTGGAAGTCATG |
| | GCTCGCGTACTTGAAACCACCCTGGATGAAATGGCTGAA |
| | CTGGATGAACAGGCGACTGACACCGCTCCCATTTCAAGC |
| | ACCTGCACGGTTTTCGCCGAAAGCGAAGTAATTAGCCAA |
| | TTGAGCAATGGTGTCTCACGCAACAACATCATTAAAGGT |
| | GTCCATCTGAGCGTTGCGTCACGTGCGTGTGGTCTGGCG |
| | TATCGCGGCGGTTTGGAGAAAGATGTTGTTATGACAGGT |
| | GGCGTGGCAAAAAATGCAGGGGTGGTGCGCGCGGTGGC |
| | GGGCGTTCTGAAGACCGATGTTATCGTTGCTCCGAATCC |
| | TCAGACGACCGGTGCACTGGGGGCAGCGCTGTATGCTTA |
| | TGAGGCCGCCCAGAAGAAGTAgatggtagtgtggggtctccccatgcga |
| | gagtagggaactgccaggcat [symbol] |
| | [symbol] ccgccgggagcggattt |
| | gaacgttgcgaagcaacggcccggagggtggcgggcaggacgcccgccataaactgcca |
| | ggcatcaaattaagc [symbol] |
| acuI-pct- | ATGCGTGCGGTACTGATCGAGAAGTCCGATGATACACAG |
| lcdABC (SEQ | TCCGTCTCTGTCACCGAACTGGCTGAAGATCAACTGCCG |
| ID NO: 242) | GAAGGCGACGTTTTGGTAGATGTTGCTTATTCAACACTG |
| | AACTACAAAGACGCCCTGGCAATTACCGGTAAAGCCCCC |
| | GTCGTTCGTCGTTTTCCGATGGTACCTGGAATCGACTTTA |
| | CGGGTACCGTGGCCCAGTCTTCCCACGCCGACTTCAAGC |
| | CAGGTGATCGCGTAATCCTGAATGGTTGGGGTGTGGGGG |
| | AAAAACATTGGGGCGGTTTAGCGGAGCGCGCTCGCGTGC |
| | GCGGAGACTGGCTTGTTCCCTTGCCAGCCCCCCTGGACTT |
| | ACGCCAAGCGGCCATGATCGGTACAGCAGGATACACGG |
| | CGATGTTGTGCGTTCTGGCGCTTGAACGTCACGGAGTGG |
| | TGCCGGGTAATGGGGAAATCGTGGTGTCCGGTGCAGCAG |
| | GCGGCGTCGGCTCCGTTGCGACGACCCTTCTTGCCGCTA |
| | AGGGCTATGAGGTAGCGGCAGTGACTGGACGTGCGTCCG |
| | AAGCAGAATATCTGCGCGGTTTGGGGGCGGCGAGCGTA |
| | ATTGATCGTAACGAATTAACGGGGAAGGTACGCCCGCTG |
| | GGTCAGGAGCGTTGGGCTGGCGGGATTGACGTGGCGGG |
| | ATCAACCGTGCTTGCGAACATGCTTTCTATGATGAAGTA |
| | TCGCGGGGTAGTCGCTGCGTGTGGCCTGGCCGCGGGCAT |
| | GGATCTGCCCGCGTCTGTCGCGCCCTTTATTCTTCGTGGG |
| | ATGACGCTGGCAGGGGTGGATAGCGTTATGTGCCCAAAG |
| | ACAGATCGTTTAGCAGCGTGGGCCCGTTTGGCGTCAGAT |
| | CTTGACCCTGCCAAGCTGGAGGAGATGACTACAGAGTTG |
| | CCGTTTAGTGAAGTAATCGAGACAGCACCCAAATTCTTG |
| | GACGGGACGGTTCGTGGCCGCATTGTTATCCCCGTAACG |
| | CCCTAAgaactctagaaataattttgtttaactttaagaaggagatatacatATGCG |
| | CAAAGTGCCGATTATCACGGCTGACGAGGCCGCAAAACT |
| | GATCAAGGACGGCGACACCGTGACAACTAGCGGCTTTGT |
| | GGGTAACGCGATCCCTGAGGCCCTTGACCGTGCAGTCGA |
| | AAAGCGTTTCCTGGAAACGGGCGAACCGAAGAACATTA |
| | CTTATGTATATTGCGGCAGTCAGGGCAATCGCGACGGTC |
| | GTGGCGCAGAACATTTCGCGCATGAAGGCCTGCTGAAAC |
| | GTTATATCGCTGGCCATTGGGCGACCGTCCCGGCGTTAG |
| | GGAAAATGGCCATGGAGAATAAAATGGAGGCCTACAAT |
| | GTCTCTCAGGGCGCCTTGTGTCATCTCTTTCGCGATATTG |
| | CGAGCCATAAACCGGGTGTGTTCACGAAAGTAGGAATCG |
| | GCACCTTCATTGATCCACGTAACGGTGGTGGGAAGGTCA |
| | ACGATATTACCAAGGAAGATATCGTAGAACTGGTGGAA |
| | ATTAAAGGGCAGGAATACCTGTTTTATCCGGCGTTCCCG |
| | ATCCATGTCGCGCTGATTCGTGGCACCTATGCGGACGAG |
| | AGTGGTAACATCACCTTTGAAAAAGAGGTAGCGCCTTTG |
| | GAAGGGACTTCTGTCTGTCAAGCGGTGAAGAACTCGGGT |
| | GGCATTGTCGTGGTTCAGGTTGAGCGTGTCGTCAAAGCA |
| | GGCACGCTGGATCCGCGCCATGTGAAAGTTCCGGGTATC |
| | TATGTAGATTACGTAGTCGTCGCGGATCCGGAGGACCAT |
| | CAACAGTCCCTTGACTGCGAATATGATCCTGCCCTTAGT |
| | GGAGAGCACCGTCGTCCGGAGGTGGTGGGTGAACCACT |
| | GCCTTTATCCGCGAAGAAAGTCATCGGCCGCCGTGGCGC |
| | GATTGAGCTCGAGAAAGACGTTGCAGTGAACCTTGGGGT |
| | AGGTGCACCTGAGTATGTGGCCTCCGTGGCCGATGAAGA |
| | AGGCATTGTGGATTTTATGACTCTCACAGCGGAGTCCGG |
| | CGCTATCGGTGGCGTTCCAGCCGGCGGTGTTCGCTTTGG |
| | GGCGAGCTACAATGCTGACGCCTTGATCGACCAGGGCTA |
| | CCAATTTGATTATTACGACGGTGGGGGTCTGGATCTTTGT |
| | TACCTGGGTTTAGCTGAATGCGACGAAAAGGGTAATATC |
| | AATGTTAGCCGCTTCGGTCCTCGTATCGCTGGGTGCGGC |
| | GGATTCATTAACATTACCCAAAACACGCCGAAAGTCTTC |
| | TTTTGTGGGACCTTTACAGCCGGGGGGCTGAAAGTGAAA |
| | ATTGAAGATGGTAAGGTGATTATCGTTCAGGAAGGGAAA |
| | CAGAAGAAATTCCTTAAGGCAGTGGAGCAAATCACCTTT |
| | AATGGAGACGTGGCCTTAGCGAACAAGCAACAAGTTAC |
| | CTACATCACGGAGCGTTGCGTCTTCCTCCTCAAAGAAGA |
| | CGGTTTACACCTTTCGGAAATCGCGCCAGGCATCGATCT |
| | GCAGACCCAGATTTTGGATGTTATGGACTTTGCCCCGAT |
| | CATTGATCGTGACGCAAACGGGCAGATTAAACTGATGGA |
| | CGCGGCGTTATTCGCAGAAGGGCTGATGGGCTTGAAAGA |
| | AATGAAGTCTTGAtaagaaggagatatacatATGAGCTTAACCCA |
| | AGGCATGAAAGCTAAACAACTGTTAGCATACTTTCAGGG |
| | TAAAGCCGATCAGGATGCACGTGAAGCGAAAGCCCGCG |
| | GTGAGCTGGTCTGCTGGTCGGCGTCAGTCGCGCCGCCGG |
| | AATTTTGCGTAACAATGGGCATTGCCATGATCTACCCGG |
| | AGACTCATGCAGCGGGCATCGGTGCCCGCAAAGGTGCG |
| | ATGGACATGCTGGAAGTTGCGGACCGCAAAGGCTACAA |
| | CGTGGATTGTTGTTCCTACGGCCGTGTAAATATGGGTTAC |
| | ATGGAATGTTTAAAAGAAGCCGCCATCACGGGCGTCAAG |
| | CCGGAAGTTTTGGTTAATTCCCCTGCTGCTGACGTTCCGC |
| | TTCCCGATTTGGTGATTACGTGTAATAATATCTGTAACAC |
| | GCTGCTGAAATGGTACGAAAACTTAGCAGCAGAACTCGA |
| | TATTCCTTGCATCGTGATCGACGTACCGTTTAATCATACC |
| | ATGCCGATTCCGGAATATGCCAAGGCCTACATCGCGGAC |
| | CAGTTCCGCAATGCAATTTCTCAGCTGGAAGTTATTTGTG |
| | GCCGTCCGTTCGATTGGAAGAAATTTAAGGAGGTCAAAG |
| | ATCAGACCCAGCGTAGCGTATACCACTGGAACCGCATTG |
| | CCGAGATGGCGAAATACAAGCCTAGCCCGCTGAACGGCT |
| | TCGATCTGTTCAATTACATGGCGTTAATCGTGGCGTGCCG |
| | CAGCCTGGATTATGCAGAAATTACCTTTAAAGCGTTCGC |
| | GGACGAATTAGAAGAGAATTTGAAGGCGGGTATCTACG |
| | CCTTTAAAGGTGCGGAAAAAACGCGCTTTCAATGGGAAG |
| | GTATCGCGGTGTGGCCACATTTAGGTCACACGTTTAAAT |
| | CTATGAAGAATCTGAATTCGATTATGACCGGTACGGCAT |
| | ACCCCGCCCTTTGGGACCTGCACTATGACGCTAACGACG |
| | AATCTATGCACTCTATGGCTGAAGCGTACACCCGTATTT |
| | ATATTAATACTTGTCTGCAGAACAAAGTAGAGGTCCTGC |
| | TTGGGATCATGGAAAAAGGCCAGGTGGATGGTACCGTAT |
| | ATCATCTGAATCGCAGCTGCAAACTGATGAGTTTCCTGA |
| | ACGTGGAAACGGCTGAAATTATTAAAGAGAAGAACGGT |
| | CTTCCTTACGTCTCCATTGATGGCGATCAGACCGATCCTC |
| | GCGTTTTTTCTCCGGCCCAGTTTGATACCCGTGTTCAGGC |
| | CCTGGTTGAGATGATGGAGGCCAATATGGCGGCAGCGG |
| | AATAAtaagaaggagatatacatATGTCACGCGTGGAGGCAATCC |
| | TGTCGCAGCTGAAAGATGTCGCCGCGAATCCGAAAAAA |
| | GCCATGGATGACTATAAAGCTGAAACAGGTAAGGGCGC |
| | GGTTGGTATCATGCCGATCTACAGCCCCGAAGAAATGGT |
| | ACACGCCGCTGGCTATTTGCCGATGGGAATCTGGGGCGC |
| | CCAGGGCAAAACGATTAGTAAAGCGCGCACCTATCTGCC |
| | TGCTTTTGCCTGCAGCGTAATGCAGCAGGTTATGGAATT |
| | ACAGTGCGAGGGCGCGTATGATGACCTGTCCGCAGTTAT |
| | TTTTAGCGTACCGTGCGACACTCTCAAATGTCTTAGCCAG |
| | AAATGGAAAGGTACGTCCCCAGTGATTGTATTTACGCAT |
| | CCGCAGAACCGCGGATTAGAAGCGGCGAACCAATTCTTG |
| | GTTACCGAGTATGAACTGGTAAAAGCACAACTGGAATCA |
| | GTTCTGGGTGTGAAAATTTCAAACGCCGCCCTGGAAAAT |
| | TCGATTGCAATTTATAACGAGAATCGTGCCGTGATGCGT |
| | GAGTTCGTGAAAGTGGCAGCGGACTATCCTCAAGTCATT |
| | GACGCAGTGAGCCGCCACGCGGTTTTTAAAGCGCGCCAG |
| | TTTATGCTTAAGGAAAAACATACCGCACTTGTGAAAGAA |
| | CTGATCGCTGAGATTAAAGCAACGCCAGTCCAGCCGTGG |
| | GACGGAAAAAAGGTTGTAGTGACGGGCATTCTGTTGGAA |
| | CCGAATGAGTTATTAGATATCTTTAATGAGTTTAAGATC |
| | GCGATTGTTGATGATGATTTAGCGCAGGAAAGCCGTCGG |
| | ATCCGTGTTGACGTTCTGGACGGAGAAGGCGGACCGCTC |
| | TACCGTATGGCTAAAGCGTGGCAGCAAATGTATGGCTGC |
| | TCGCTGGCAACCGACACCAAGAAGGGTCGCGGCCGTATG |
| | TTAATTAACAAAACGATTCAGACCGGTGCGGACGCTATC |
| | GTAGTTGCAATGATGAAGTTTTGCGACCCAGAAGAATGG |
| | GATTATCCGGTAATGTACCGTGAATTTGAAGAAAAAGGG |
| | GTCAAATCACTTATGATTGAGGTGGATCAGGAAGTATCG |
| | TCTTTCGAACAGATTAAAACCCGTCTGCAGTCATTCGTCG |
| | AAATGCTTTAAtaagaaggagatatacatATGTATACCTTGGGGAT |
| | TGATGTCGGTTCTGCCTCTAGTAAAGCGGTGATTCTGAA |
| | AGATGGAAAAGATATTGTCGCTGCCGAGGTTGTCCAAGT |
| | CGGTACCGGCTCCTCGGGTCCCCAACGCGCACTGGACAA |
| | AGCCTTTGAAGTCTCTGGCTTAAAAAAGGAAGACATCAG |
| | CTACACAGTAGCTACGGGCTATGGGCGCTTCAATTTTAG |
| | CGACGCGGATAAACAGATTTCGGAAATTAGCTGTCATGC |
| | CAAAGGCATTTATTTCTTAGTACCAACTGCGCGCACTATT |
| | ATTGACATTGGCGGCCAAGATGCGAAAGCCATCCGCCTG |
| | GACGACAAGGGGGGTATTAAGCAATTCTTCATGAATGAT |
| | AAATGCGCGGCGGGCACGGGGCGTTTCCTGGAAGTCATG |
| | GCTCGCGTACTTGAAACCACCCTGGATGAAATGGCTGAA |
| | CTGGATGAACAGGCGACTGACACCGCTCCCATTTCAAGC |
| | ACCTGCACGGTTTTCGCCGAAAGCGAAGTAATTAGCCAA |
| | TTGAGCAATGGTGTCTCACGCAACAACATCATTAAAGGT |
| | GTCCATCTGAGCGTTGCGTCACGTGCGTGTGGTCTGGCG |
| | TATCGCGGCGGTTTGGAGAAAGATGTTGTTATGACAGGT |
| | GGCGTGGCAAAAAATGCAGGGGTGGTGCGCGCGGTGGC |
| | GGGCGTTCTGAAGACCGATGTTATCGTTGCTCCGAATCC |
| | TCAGACGACCGGTGCACTGGGGGCAGCGCTGTATGCTTA |
| | TGAGGCCGCCCAGAAGAAGTA |

### Example 26

### Quantification of Propionate by LC-MS/MS

### Sample Preparation

[1080] First, fresh 1000, 500, 250, 100, 20, 4 and 0.8 m/mL sodium propionate standards were prepared in water. Then, 25 μL of sample (bacterial supernatants and standards) were pipetted into a V-bottom polypropylene 96-well plate, and 75 μL of 60% ACN (45 uL ACN+30 uL water per reaction) with 10 ug/mL of propionate-d5 (CDN isotope) internal standard in final solution were added to each sample. The plate was heat-sealed, mixed well, and centrifuged at 4000 rpm for 5 minutes. In a round-bottom 96-well polypropylene plate, 5 μL of diluted samples were added to 95 μL of a buffer containing 10 mM MES pH4.5, 20 mM EDC (N-(3-Dimethylaminopropyl)-N′-ethylcarbodiimide), and 20 mM TFEA (2,2,2-trifluroethylamine). The plate was again heat-sealed and mixed well, and samples were incubated at room temperature for 1 hour

### LC-MS/MS Method

[1081] Propionate was measured by liquid chromatography coupled to tandem mass spectrometry (LC-MS/MS) using a Thermo TSQ Quantum Max triple quadrupole mass spectrometer. HPLC Details are listed in Table 49 and Table 50. Tandem Mass Spectrometry details are found in Table 51.

TABLE 49
HPLC Details

| | |
|---|---|
| Column | Thermo Aquasil C18 |
| | column, 5 μm (50 × 2.1 mm) |
| Mobile | 100% H2O, 0.1% Formic |
| Phase A | Acid |
| Mobile | 100% ACN, 0.1% Formic |
| Phase B | Acid |
| Injection | 10 uL |
| volume | |

TABLE 50
HPLC Method

| Total | Flow | | |
|---|---|---|---|
| Time | Rate | | |
| (min) | (μL/min) | A % | B % |
| 0 | 0.5 | 100 | 0 |
| 1 | 0.5 | 100 | 0 |
| 2 | 0.5 | 10 | 90 |
| 4 | 0.5 | 10 | 90 |
| 4.01 | 0.5 | 100 | 0 |
| 4.25 | 0.5 | 100 | 0 |

TABLE 51
Tandem Mass Spectrometry Details

| Ion Source | HESI-II |
|---|---|
| Polarity | Positive |
| SRM | Propionate |
| transitions | 156.2/57.1, |
| | Propionate-d5 |
| | 161/62.1 |

### Example 27

### GLP-1 Production from Genetically Engineered Bacteria and Activity Measurements

[1082] To determine whether GLP-1 can be expressed by the genetically engineered bacteria, a construct expressing GLP-1 in conjunction with a modified flagellar type III secretion system shown in FIG. 61 was generated and integrated into the E coli Nissle chromosome. The construct comprises GLP-1 under control of the native FliC promoter and 5′UTR (untranslated region containing the N-terminal flagellar secretion signal) with an optimized ribosome binding site FIG. 23 and Table 52).

TABLE 52
GLP-1 construct sequences

| Description and SEQ ID NO | Sequence |
|---|---|
| GLP-1 under control of the native | ttaaccacgacctttaaccagccaagcaataaactctttcgcagc |
| FliC promoter and 5′UTR with an | ctggccctccaaatagctagaaacatcagaagtgaaagttccct |
| optimized ribosome binding site (in | ccgcgtggcgttcgaactcgtccatattacctcctgactgtgtcta |
| reverse orientation) | cttcgttgattacgttttgggtttccacccgtcggctcaatcgccgt |
| (SEQ ID NO: 243) | ca |
| GLP-1 (in reverse orientation) | ttaaccacgacctttaaccagccaagcaataaactctttcgcagc |
| (SEQ ID NO: 244) | ctggccctccaaatagctagaaacatcagaagtgaaagttccct |
| | ccgcgtggcgttcgaactcgtccat |
| FliC 5′ UTR (in reverse orientation) | attacctcctgactgtgtctacttcgttgattacgttttgggtttcca |
| (SEQ ID NO: 245) | cccgtcggctcaatcgccgtca |
| Optimized RBS (in reverse | attacctcctgactgtgtctacttc |
| orientation) | |
| (SEQ ID NO: 246) | |
| Putative terminator | gggcagaaaaaaccccgccgttggcggggaagcacgttgc |
| (SEQ ID NO: 247) | |
| GLP-1 construct comprising | Gggcagaaaaaaccccgccgttggcggggaagcacgttgc |
| terminator (lower case italic) GLP-1 | tggcaaattaccattcatgttgccggatgcggcgtaaacgcctta |
| (lower case bold) under control of | tccggcctacaaaaatgtgcaaattcaataaattgcaattcccctt |
| the native FliC promoter and 5′UTR | gtaggcctgataagcgcagcgcatcaggcaatttggcgttgcc |
| (upper case bold, with optimized | gtcagtctcagttaatcaggttacggcgattaaccacgaccttt |
| RBS underlined) and a | aaccagccaagcaataaactctttcgcagcctggccctcca |
| chloramphenicol resistance gene | aatagctagaaacatcagaagtgaaagttccctccgcgtgg |
| under the control of the cat promoter | cgttcgaactcgtccatATTACCTCCTGACTGTG |
| (upper case italic bold), frt homology | TCTACTTCGTTGATTACGTTTTGGGTTT |
| (upper case underlined) | CCACCCGTCGGCTCAATCGCCGTCAAC |
| (SEQ ID NO: 248) | CCTGTTATCGTCTGTCGTAAAACAACC |
| | TTTAGAATTTTTTTCACAAACAGCCATT |
| | TTTTGTTAGTCGACGAAATACTCTTTTC |
| | TCTGCCCCTTATTCCCGCTATTAAAAAA |
| | AACAATTAAACGTAAACTTTGCGCAAT |
| | TCAGGCCGATAACCCCGGTATTCGTTT |
| | TACGTGTCGAAAGATAAACGAAGTTCC |
| | TATACTTTCTAGAGAATAGGAACTTCG |
| | GAATAGGAACTTCATTTCTCGTTCGCT |
| | GCCACCTAAGAATACTCTACGGTCACA |
| | TACAAATGGCGCGCCTTACGCCCCGCC |
| | CTGCCA [symbol] |
| | [symbol] |
| | [symbol] |
| | [symbol] |
| | [symbol] |
| | [symbol] |
| | [symbol] |
| | [symbol] |
| | [symbol] |
| | [symbol] |
| | [symbol] |
| | [symbol] |
| | [symbol] |
| | [symbol] |
| | [symbol] |
| | [symbol] |
| | [symbol] |
| | [symbol] |
| | [symbol] |
| | [symbol] |
| | [symbol] |
| | [symbol] |
| | [symbol] |
| | [symbol] |
| | [symbol] |
| | [symbol] |
| | [symbol] ACG |
| | TCTCATTTTCGCCAAAAGTTGGCCCAG |
| | GGCTTCCCGGTATCAACAGGGACACCA |
| | GGATTTATTTATTCTGCGAAGTGATCTT |
| | CCGTCACAGGTAGGCGCGCCGAAGTTC |
| | CTATACTTTCTAGAGAATAGGAACTTC |
| | GGAATAGGAACT |

[1083] Cultures (the genetically engineered bacteria comprising the GLP-1 construct or streptomycin resistant control Nissle) are grown overnight in F-12K medium (Mediatech, Manassas, Va.) without glucose (containing selective antibiotics (chloramphenicol or streptomycin) and then diluted 1:200. The cells are grown with shaking at 250 rpm, and at indicated times (0, 3, 6, and 12 h), the supernatant aliquots are collected for GLP-1 quantification.

[1084] Additionally, bacteria are pelleted, washed, and harvested, resuspended in 25 mL sonication buffer (50 mM Tris-HCl, 30 mM NaCl, pH 8.0) with protease inhibitors, and lysed by sonication on ice. Insoluble debris is spun down twice for 20 min at 12,000 rpm at 4° C. to detect any intracellular recombinant protein.

[1085] To generate cell free medium, the supernatant is centrifuged, and filtered through a 0.2-micron filter to remove any remaining bacteria. The cell-free culture medium (CFM) is diluted to OD600=1 with F-12K, and 10 ng/ml leupeptin, 200 μM PMSF and 5 ng/mL aprotinin was added to the CFM to inhibit proteases prior storage at 4° C.

### Western Blotting

[1086] The cell-free culture medium (CFM) was diluted to the same OD600 with F-12K, and 10 ng/ml leupeptin, PMSF and 5 ng/mL aprotinin was added to inhibit proteases. Clarified supernatant (14 ml) is precipitated with 10% trichloroacetic acid (TCA, VWR) for 30 min on ice, and the pellet was washed twice in ice-cold ethanol/ether (1:1). The supernatant pellet is dried under vacuum, dissolved in 50 pi sample buffer (2% SDS, 50 mM Tris, pH 6.8, 20%glycerol, 10% mercaptoethanol, bromophenol blue) and boiled for 5 min at 95° C. The cell pellet is resuspended (From 14 ml culture) in room temperature BugBuster Master Mix by gentle vortexing, using 500 μl BugBuster Master Mix with protease inhibitors (10 ng/ml Leupeptin, 200₁IMPMSF and 5 ng/mL aprotinin). The cell suspension is incubated on a shaking platform (VWR, Bristol, Conn.) at a slow setting for 10-20 min at room temperature. 125 μl 5× sample buffer is added to each sample before and boiling for 10 min at 95° C.

[1087] Protein concentration is determined by BCA protein assay, and isolated proteins are analyzed by Western blot. Proteins are transferred onto PVDF membranes are detected with an HRP-conjugated Glucagon Antibody (24HCLC), ABfinity™ Rabbit Oligoclonal, Thermo Fisher.

Co-culture with Caco-2 cells and ELISA for Insulin

[1088] To determine whether the GLP-1 expressed by the genetically engineered bacteria is functional, a co-culture experiment is conducted in which the bacterial supernatant containing GLP-1 is added to the growth medium of a mammalian intestinal cell line, Caco-2. Caco-2 cells are an intestinal cell line derived from a human colorectal carcinoma that spontaneously differentiates under standard culture conditions, and which lends itself to the in vitro study of human gut. The ability of the Caco-2 cells to produce insulin upon exposure to the bacterial cell free supernatant is measured.

[1089] Caco-2 epithelial cells (ATCC# CRL-2102, Manassas, Va.) are maintained in Dulbecco's Modified Eagle Media (DMEM, Cellgro, Herndon,Va.) plus 10% FBS (Cellgro) at 37° C. in a humidified incubator supplemented with 5% CO2. For co-culture experiments, Caco-2 cells are grown in F-12K supplemented with 10% FBS at 37° C. in a humidified incubator supplemented with 5% CO2. All co-culture experiments are performed in F-12K plus 10% FBS with Caco-2 cells in passages between 15 and 22.

[1090] Approximately 80% confluent monolayers of Caco-2 cells in 12-well plates are washed with fresh F-12K plus 10% FBS once and covered with 1 mL 50% CFM in F-12K with 10% FBS and incubated at 37° C. with 5% CO₂. 200 nM. As a control, the same volume of recombinant GLP-1 (200 nM) in F-12K with 10% FBS is added as a positive control in separate wells. Following a 16 h incubation, an additional 1 mL of 50% CFM in F-12K with 10% FBS or GLP-1 is added to the cells, supplemented with 0.4% Glucose or 0.4% Glycerol before incubation for an additional 2 h. The media is removed from the cells, supplemented with Leupeptin (10 ng/mL), 0.2 mM PMSF and aprotinin (10 ng/mL), centrifuged (12,000×rpm), and kept briefly at 4° C. prior to ELISA analysis for insulin expression (see “Immuno-blot and ELISA” section).

[1091] In order to estimate the amount of insulin secreted from Caco-2 cells activated by Glp-1, cell free supernatants are assayed using standard ELISA procedures using the Insulin ELISA Kit, Human (KAQ125, Thermo Fisher), according to manufacturer's instructions.

### Example 28

### In Vivo NASH Studies

[1092] For in vivo studies, a mouse model is used to study the effects of liver steatosis and hepatic inflammation (Jun Jin, et al., Brit. J. Nutrition, 114:145-1755 (2015)). To briefly summarize, female C57BL/6J mice are fasted and fed either a standard liquid diet of carbohydrates, fat, and protein; or a liquid Western style diet (WSD) fortified with fructose, fat, cholesterol, and a sodium butyrate supplement for six weeks. Butyrate is a short chain fatty acid naturally produced by intestinal bacteria effective in maintaining intestinal homoeostasis. Body weight and plasma samples can be taken throughout the duration of the study. Upon conclusion of the study, the mice can be killed, and the liver and intestine can be removed and assayed. A decrease in liver damage after treatment with the engineered bacterial cells indicates that the engineered bacterial cells described herein are effective for treating nonalcoholic steatohepatitis (NASH).

[1093] Additionally, throughout the study, phenotypes of the mice can also be analyzed. A decrease in the number of symptoms associated with nonalcoholic steatohepatitis (NASH), for example, weight loss, further indicates the efficacy of the engineered bacterial cells described herein for treating nonalcoholic steatohepatitis (NASH).

### Example 29

### Construction of Plasmids Encoding Bile Salt Hydrolase Enzymes

[1094] The bile salt hydrolase genes from Lactobacillus plantarum (SEQ ID NO:1) is synthesized (Genewiz), fused to the Tet promoter, cloned into the high-copy plasmid pUC57-Kan by Gibson assembly, and transformed into E. coli DH5α as described herein to generate the plasmid pTet-BSH.

### Example 30

### Generation of Recombinant Bacteria Comprising a Bile Salt Hydrolase Enzyme

[1095] The pTet-BSH plasmid described above is transformed into E. coli Nissle, DH5α, or PIR1. All tubes, solutions, and cuvettes are pre-chilled to 4° C. An overnight culture of E. coli (Nissle, DH5α or PIR1) is diluted 1:100 in 4 mL of LB and grown until it reaches an OD₆₀₀ of 0.4-0.6. 1mL of the culture is then centrifuged at 13,000 rpm for 1 min in a 1.5 mL microcentrifuge tube and the supernatant is removed. The cells are then washed three times in pre-chilled 10% glycerol and resuspended in 40 uL pre-chilled 10% glycerol. The electroporator is set to 1.8 kV. 1 uL of a pTet-BSH miniprep is added to the cells, mixed by pipetting, and pipetted into a sterile, chilled 1mm cuvette. The dry cuvette is placed into the sample chamber, and the electric pulse is applied. 500 uL of room-temperature SOC media is immediately added, and the mixture is transferred to a culture tube and incubated at 37° C. for 1 hr. The cells are spread out on an LB plate containing 50 ug/mL Kanamycin for pTet-BSH.

### Example 31

### Functional Assay Demonstrating that the Recombinant Bacterial Cells Decrease Bile Salt Concentration

[1096] For in vitro studies, all incubations will be performed at 37° C. Cultures of E. coli Nissle containing pTet-BSH are grown overnight in LB and then diluted 1:100 in LB. The cells are grown with shaking (250 rpm) to early log phase with the appropriate antibiotics. Anhydrous tetracycline (ATC) is added to cultures at a concentration of 100 ng/mL to induce expression of bile salt hydrolase, and bacteria are grown for another 3 hours. Culture broths are then inoculated at 20% in flasks containing fresh LB culture media containing excess bile salts (either 0.5% (wt/vol) TDCA, 0.5% (wt/vol) GDCA, or 3% (vol/vol) human bile) and grown for 16 hours with shaking (250 rpm). A “medium blank” for each culture condition broth is also prepared whereby the “medium blank” is not inoculated with bacteria but treated under the same conditions as the inoculated broths. Following the 16 hour incubation period, broth cultures are pasteurized at 90° C. for 15 minutes, centrifuged at 5,000 rpm for 10 minutes, and supernatants filtered with a 0.45 micron filter.

[1097] Bile salt levels and activity in the supernatants is determined. Briefly, bile salt hydrolase activity can be assessed using a plate assay as described in Dashkevicz and Feighner, Applied Environ. Microbiol., 55:11-16 (1989) and Christiaens et al., Appl. Environ. Microbiol., 58:3792-3798 (1992). BSH activity can also be indicated by halos of precipitated deconjugated bile acids (see, also, Jones et al., PNAS, 105(36):13580-13585 (2008)). A ninhydrine assay for free taurine has also been described (see, for example, Clarke et al., Gut Microbes, 3(3):186-202 (2012)).

### Example 32

### In Vivo Studies Demonstrating that the Recombinant Bacterial Cells Decrease Bile Salt Concentration

[1098] For in vivo studies, a mouse model of weight gain and lipid metabolism (as described by Joyce et al., PNAS, 111(20):7421-7426 (2014)) is used. To briefly summarize, C57BL/6J mice and germ-free Swiss Webster mice can be fasted and fed either a normal low-fat diet or a high-fat diet for ten weeks. After ten weeks, the mice can be inoculated with recombinant bacteria comprising a bile salt hydrolase enzyme (as described herein) or control bacteria. Body weight, plasma samples, and fecal samples can be taken throughout the duration of the study. Upon conclusion of the study, the mice can be killed, and internal organs (liver, spleen, intestines) and fat pads can be removed and assayed. Treatment efficacy is determined, for example, by measuring levels of bile salts and bile acids. A decrease in levels of bile salts after treatment with the recombinant bacterial cells indicates that the recombinant bacterial cells described herein are effective for treating disorders associated with bile salts.

[1099] Additionally, throughout the study, phenotypes of the mice can also be analyzed. A decrease in the number of symptoms associated with disorders associated with bile salts, for example, weight loss, further indicates the efficacy of the recombinant bacterial cells described herein for treating disorders associated with bile salts.

### Example 33

### Nitric oxide-Inducible Reporter Constructs

[1100] ATC and nitric oxide-inducible reporter constructs were synthesized (Genewiz, Cambridge, Mass.). When induced by their cognate inducers, these constructs express GFP, which is detected by monitoring fluorescence in a plate reader at an excitation/emission of 395/509 nm, respectively. Nissle cells harboring plasmids with either the control, ATC-inducible Ptet-GFP reporter construct, or the nitric oxide inducible PnsrR-GFP reporter construct were first grown to early log phase (OD600 of about 0.4-0.6), at which point they were transferred to 96-well microtiter plates containing LB and two-fold decreased inducer (ATC or the long half-life NO donor, DETA-NO (Sigma)). Both ATC and NO were able to induce the expression of GFP in their respective constructs across a range of concentrations (FIG. 77); promoter activity is expressed as relative florescence units. An exemplary sequence of a nitric oxide-inducible reporter construct is shown. The bsrR sequence is bolded. The gfp sequence is underlined. The PnsrR (NO regulated promoter and RBS) is italicized. The constitutive promoter and RBS are

[symbol]

TABLE 53
SEQ ID NO: 249

ttattatcgcaccgcaatcgggattttcgattcataaagcaggtcgtaggtcggcttgt
tgagcaggtcttgcagcgtgaaaccgtccagatacgtgaaaaacgacttcattgcaccg
ccgagtatgcccgtcagccggcaggacggcgtaatcaggcattcgttgttcgggcccat
acactcgaccagctgcatcggttcgaggtggcggacgaccgcgccgatattgatgcgtt
cgggcggcgcggccagcctcagcccgccgcctttcccgcgtacgctgtgcaagaacccg
cctttgaccagcgcggtaaccactttcatcaaatggcttttggaaatgccgtaggtcga
ggcgatggtggcgatattgaccagcgcgtcgtcgttgacggcggtgtagatgaggacgc

[chemical structure]

[chemical structure]

[chemical structure]

[chemical structure]

aattttaaactctagaaataattttgtttaactttaagaaggagatatacatatggcta
gcaaaggcgaagaattgttcacgggcgttgttcctattttggttgaattggatggcgat
gttaatggccataaattcagcgttagcggcgaaggcgaaggcgatgctacgtatggcaa
attgacgttgaaattcatttgtacgacgggcaaattgcctgttccttggcctacgttgg
ttacgacgttcagctatggcgttcaatgtttcagccgttatcctgatcatatgaaacgt
catgatttcttcaaaagcgctatgcctgaaggctatgttcaagaacgtacgattagctt
caaagatgatggcaattataaaacgcgtgctgaagttaaattcgaaggcgatacgttgg
ttaatcgtattgaattgaaaggcattgatttcaaagaagatggcaatattttgggccat
aaattggaatataattataatagccataatgtttatattacggctgataaacaaaaaaa
tggcattaaagctaatttcaaaattcgtcataatattgaagatggcagcgttcaattgg
ctgatcattatcaacaaaatacgcctattggcgatggccctgttttgttgcctgataat
cattatttgagcacgcaaagcgctttgagcaaagatcctaatgaaaaacgtgatcatat
ggttttgttggaattcgttacggctgctggcattacgcatggcatggatgaattgtata
aataataa

[1101] These constructs, when induced by their cognate inducer, lead to high level expression of GFP, which is detected by monitoring fluorescence in a plate reader at an excitation/emission of 395/509 nm, respectively. Nissle cells harboring plasmids with either the ATC-inducible Ptet-GFP reporter construct or the nitric oxide inducible PnsrR-GFP reporter construct were first grown to early log phase (OD600=˜0.4-0.6), at which point they were transferred to 96-well microtiter plates containing LB and 2-fold decreases in inducer (ATC or the long half-life NO donor, DETA-NO (Sigma)). It was observed that both the ATC and NO were able to induce the expression of GFP in their respective construct across a wide range of concentrations. Promoter activity is expressed as relative florescence units.

[1102] FIG. 77 shows NO-GFP constructs (the dot blot) E. coli Nissle harboring the nitric oxide inducible NsrR-GFP reporter fusion were grown overnight in LB supplemented with kanamycin. Bacteria were then diluted 1:100 into LB containing kanamycin and grown to an optical density of 0.4-0.5 and then pelleted by centrifugation. Bacteria were resuspended in phosphate buffered saline and 100 microliters were administered by oral gavage to mice. IBD is induced in mice by supplementing drinking water with 2-3% dextran sodium sulfate for 7 days prior to bacterial gavage. At 4 hours post-gavage, mice were sacrificed and bacteria were recovered from colonic samples. Colonic contents were boiled in SDS, and the soluble fractions were used to perform a dot blot for GFP detection (induction of NsrR-regulated promoters). Detection of GFP was performed by binding of anti-GFP antibody conjugated to HRP (horse radish peroxidase). Detection was visualized using

[1103] Pierce chemiluminescent detection kit. It is shown in the figure that NsrR-regulated promoters are induced in DSS-treated mice, but are not shown to be induced in untreated mice. This is consistent with the role of NsrR in response to NO, and thus inflammation.

[1104] Bacteria harboring a plasmid expressing NsrR under control of a constitutive promoter and the reporter gene gfp (green fluorescent protein) under control of an NsrR-inducible promoter were grown overnight in LB supplemented with kanamycin. Bacteria are then diluted 1:100 into LB containing kanamycin and grown to an optical density of about 0.4-0.5 and then pelleted by centrifugation. Bacteria are resuspended in phosphate buffered saline and 100 microliters were administered by oral gavage to mice. IBD is induced in mice by supplementing drinking water with 2-3% dextran sodium sulfate for 7 days prior to bacterial gavage. At 4 hours post-gavage, mice were sacrificed and bacteria were recovered from colonic samples. Colonic contents were boiled in SDS, and the soluble fractions were used to perform a dot blot for GFP detection (induction of NsrR-regulated promoters) Detection of GFP was performed by binding of anti-GFP antibody conjugated to HRP (horse radish peroxidase). Detection was visualized using Pierce chemiluminescent detection kit. FIG. 77D shows NsrR-regulated promoters are induced in DSS-treated mice, but not in untreated mice.

### Example 34

### FNR Promoter Activity

[1105] In order to measure the promoter activity of different FNR promoters, the lacZ gene, as well as transcriptional and translational elements, were synthesized (Gen9, Cambridge, Mass.) and cloned into vector pBR322. The lacZ gene was placed under the control of any of the exemplary FNR promoter sequences disclosed in Table 18 and Table 19. The nucleotide sequences of these constructs are shown in Tables 54-58 ((SEQ ID NO: 250-254). However, as noted above, the lacZ gene may be driven by other inducible promoters in order to analyze activities of those promoters, and other genes may be used in place of the lacZ gene as a readout for promoter activity, exemplary results are shown in FIG. 75.

[1106] Table 54 shows the nucleotide sequence of an exemplary construct comprising a gene encoding lacZ, and an exemplary FNR promoter, P_{fnr1} (SEQ ID NO: 250). The construct comprises a translational fusion of the Nissle nirB1 gene and the lacZ gene, in which the translational fusions are fused in frame to the 8^{th} codon of the lacZ coding region. The P_{fnri} sequence is bolded lower case, and the predicted ribosome binding site within the promoter is underlined. The lacZ sequence is underlined upper case. ATG site is bolded upper case, and the cloning sites used to synthesize the construct are shown in regular upper case.

[1107] Table 55 shows the nucleotide sequence of an exemplary construct comprising a gene encoding lacZ, and an exemplary FNR promoter, P_{fnr2} ((SEQ ID NO: 251). The construct comprises a translational fusion of the Nissle ydfZ gene and the lacZ gene, in which the translational fusions are fused in frame to the 8^{th} codon of the lacZ coding region. The P_{fnr2} sequence is bolded lower case, and the predicted ribosome binding site within the promoter is underlined. The lacZ sequence is underlined upper case. ATG site is bolded upper case, and the cloning sites used to synthesize the construct are shown in regular upper case.

[1108] Table 56 shows the nucleotide sequence of an exemplary construct comprising a gene encoding lacZ, and an exemplary FNR promoter, P_{fnr3} ((SEQ ID NO: 252). The construct comprises a transcriptional fusion of the Nissle nirB gene and the lacZ gene, in which the transcriptional fusions use only the promoter region fused to a strong ribosomal binding site. The P_{fnr3} sequence is bolded lower case, and the predicted ribosome binding site within the promoter is underlined. The lacZ sequence is underlined upper case. ATG site is bolded upper case, and the cloning sites used to synthesize the construct are shown in regular upper case.

[1109] Table 57 shows the nucleotide sequence of an exemplary construct comprising a gene encoding lacZ, and an exemplary FNR promoter, P_{fnr4} ((SEQ ID NO: 253). The construct comprises a transcriptional fusion of the Nissle ydfZ gene and the lacZ gene. The P_{fnr4} sequence is bolded lower case, and the predicted ribosome binding site within the promoter is underlined. The lacZ sequence is underlined upper case. ATG site is bolded upper case, and the cloning sites used to synthesize the construct are shown in regular upper case.

[1110] Table 58 shows the nucleotide sequence of an exemplary construct comprising a gene encoding lacZ, and an exemplary FNR promoter, PfnrS ((SEQ ID NO: 254). The construct comprises a transcriptional fusion of the anaerobically induced small RNA gene, fnrS1, fused to lacZ. The P_{fnrs} sequence is bolded lower case, and the predicted ribosome binding site within the promoter is underlined. The lacZ sequence is underlined upper case. ATG site is bolded upper case, and the cloning sites used to synthesize the construct are shown in regular upper case.

TABLE 54
Pfnr1-lacZ construct Sequences
Nucleotide sequences of Pfnr1-lacZ construct, low-copy
(SEQ ID NO: 250)

GGTACCgtcagcataacaccctgacctctcattaattgttcatgccgggcggcacta
tcgtcgtccggccttttcctctcttactctgctacgtacatctatttctataaatcc
gttcaatttgtctgttttttgcacaaacatgaaatatcagacaattccgtgacttaa
gaaaatttatacaaatcagcaatataccccttaaggagtatataaaggtgaatttga
tttacatcaataagcggggttgctgaatcgttaaggtaggcggtaatagaaaagaaa
tcgaggcaaaaATGagcaaagtcagactcgcaattatGGATCCTCTGGCCGTCGTAT
TACAACGTCGTGACTGGGAAAACCCTGGCGTTACCCAACTTAATCGCCTTGCGGCAC
ATCCCCCTTTCGCCAGCTGGCGTAATAGCGAAGAGGCCCGCACCGATCGCCCTTCCC
AACAGTTGCGCAGCCTGAATGGCGAATGGCGCTTTGCCTGGTTTCCGGCACCAGAAG
CGGTGCCGGAAAGCTGGCTGGAGTGCGATCTTCCTGACGCCGATACTGTCGTCGTCC
CCTCAAACTGGCAGATGCACGGTTACGATGCGCCTATCTACACCAACGTGACCTATC
CCATTACGGTCAATCCGCCGTTTGTTCCCGCGGAGAATCCGACAGGTTGTTACTCGC
TCACATTTAATATTGATGAAAGCTGGCTACAGGAAGGCCAGACGCGAATTATTTTTG
ATGGCGTTAACTCGGCGTTTCATCTGTGGTGCAACGGGCGCTGGGTCGGTTACGGCC
AGGACAGCCGTTTGCCGTCTGAATTTGACCTGAGCGCATTTTTACGCGCCGGAGAAA
ACCGCCTCGCGGTGATGGTGCTGCGCTGGAGTGACGGCAGTTATCTGGAAGATCAGG
ATATGTGGCGGATGAGCGGCATTTTCCGTGACGTCTCGTTGCTGCATAAACCGACCA
CGCAAATCAGCGATTTCCAAGTTACCACTCTCTTTAATGATGATTTCAGCCGCGCGG
TACTGGAGGCAGAAGTTCAGATGTACGGCGAGCTGCGCGATGAACTGCGGGTGACGG
TTTCTTTGTGGCAGGGTGAAACGCAGGTCGCCAGCGGCACCGCGCCTTTCGGCGGTG
AAATTATCGATGAGCGTGGCGGTTATGCCGATCGCGTCACACTACGCCTGAACGTTG
AAAATCCGGAACTGTGGAGCGCCGAAATCCCGAATCTCTATCGTGCAGTGGTTGAAC
TGCACACCGCCGACGGCACGCTGATTGAAGCAGAAGCCTGCGACGTCGGTTTCCGCG
AGGTGCGGATTGAAAATGGTCTGCTGCTGCTGAACGGCAAGCCGTTGCTGATTCGCG
GCGTTAACCGTCACGAGCATCATCCTCTGCATGGTCAGGTCATGGATGAGCAGACGA
TGGTGCAGGATATCCTGCTGATGAAGCAGAACAACTTTAACGCCGTGCGCTGTTCGC
ATTATCCGAACCATCCGCTGTGGTACACGCTGTGCGACCGCTACGGCCTGTATGTGG
TGGATGAAGCCAATATTGAAACCCACGGCATGGTGCCAATGAATCGTCTGACCGATG
ATCCGCGCTGGCTACCCGCGATGAGCGAACGCGTAACGCGGATGGTGCAGCGCGATC
GTAATCACCCGAGTGTGATCATCTGGTCGCTGGGGAATGAATCAGGCCACGGCGCTA
ATCACGACGCGCTGTATCGCTGGATCAAATCTGTCGATCCTTCCCGCCCGGTACAGT
ATGAAGGCGGCGGAGCCGACACCACGGCCACCGATATTATTTGCCCGATGTACGCGC
GCGTGGATGAAGACCAGCCCTTCCCGGCGGTGCCGAAATGGTCCATCAAAAAATGGC
TTTCGCTGCCTGGAGAAATGCGCCCGCTGATCCTTTGCGAATATGCCCACGCGATGG
GTAACAGTCTTGGCGGCTTCGCTAAATACTGGCAGGCGTTTCGTCAGTACCCCCGTT
TACAGGGCGGCTTCGTCTGGGACTGGGTGGATCAGTCGCTGATTAAATATGATGAAA
ACGGCAACCCGTGGTCGGCTTACGGCGGTGATTTTGGCGATACGCCGAACGATCGCC
AGTTCTGTATGAACGGTCTGGTCTTTGCCGACCGCACGCCGCATCCGGCGCTGACGG
AAGCAAAACACCAACAGCAGTATTTCCAGTTCCGTTTATCCGGGCGAACCATCGAAG
TGACCAGCGAATACCTGTTCCGTCATAGCGATAACGAGTTCCTGCACTGGATGGTGG
CACTGGATGGCAAGCCGCTGGCAAGCGGTGAAGTGCCTCTGGATGTTGGCCCGCAAG
GTAAGCAGTTGATTGAACTGCCTGAACTGCCGCAGCCGGAGAGCGCCGGACAACTCT
GGCTAACGGTACGCGTAGTGCAACCAAACGCGACCGCATGGTCAGAAGCCGGACACA
TCAGCGCCTGGCAGCAATGGCGTCTGGCGGAAAACCTCAGCGTGACACTCCCCTCCG
CGTCCCACGCCATCCCTCAACTGACCACCAGCGGAACGGATTTTTGCATCGAGCTGG
GTAATAAGCGTTGGCAATTTAACCGCCAGTCAGGCTTTCTTTCACAGATGTGGATTG
GCGATGAAAAACAACTGCTGACCCCGCTGCGCGATCAGTTCACCCGTGCGCCGCTGG
ATAACGACATTGGCGTAAGTGAAGCGACCCGCATTGACCCTAACGCCTGGGTCGAAC
GCTGGAAGGCGGCGGGCCATTACCAGGCCGAAGCGGCGTTGTTGCAGTGCACGGCAG
ATACACTTGCCGACGCGGTGCTGATTACAACCGCCCACGCGTGGCAGCATCAGGGGA
AAACCTTATTTATCAGCCGGAAAACCTACCGGATTGATGGGCACGGTGAGATGGTCA
TCAATGTGGATGTTGCGGTGGCAAGCGATACACCGCATCCGGCGCGGATTGGCCTGA
CCTGCCAGCTGGCGCAGGTCTCAGAGCGGGTAAACTGGCTCGGCCTGGGGCCGCAAG
AAAACTATCCCGACCGCCTTACTGCAGCCTGTTTTGACCGCTGGGATCTGCCATTGT
CAGACATGTATACCCCGTACGTCTTCCCGAGCGAAAACGGTCTGCGCTGCGGGACGC
GCGAATTGAATTATGGCCCACACCAGTGGCGCGGCGACTTCCAGTTCAACATCAGCC
GCTACAGCCAACAACAACTGATGGAAACCAGCCATCGCCATCTGCTGCACGCGGAAG
AAGGCACATGGCTGAATATCGACGGTTTCCATATGGGGATTGGTGGCGACGACTCCT
GGAGCCCGTCAGTATCGGCGGAATTCCAGCTGAGCGCCGGTCGCTACCATTACCAGT
TGGTCTGGTGTCAAAAATAA

TABLE 55
Pfnr2-lacZ construct sequences
Nucleotide sequences of Pfnr2-lacZ construct, low-copy
(SEQ ID NO: 251)

GGTACCcatttcctctcatcccatccggggtgagagtcttttcccccgacttatggctc
atgcatgcatcaaaaaagatgtgagcttgatcaaaaacaaaaaatatttcactcgacag
gagtatttatattgcgcccgttacgtgggcttcgactgtaaatcagaaaggagaaaaca
cctATGacgacctacgatcgGGATCCTCTGGCCGTCGTATTACAACGTCGTGACTGGGA
AAACCCTGGCGTTACCCAACTTAATCGCCTTGCGGCACATCCCCCTTTCGCCAGCTGGC
GTAATAGCGAAGAGGCCCGCACCGATCGCCCTTCCCAACAGTTGCGCAGCCTGAATGGC
GAATGGCGCTTTGCCTGGTTTCCGGCACCAGAAGCGGTGCCGGAAAGCTGGCTGGAGTG
CGATCTTCCTGACGCCGATACTGTCGTCGTCCCCTCAAACTGGCAGATGCACGGTTACG
ATGCGCCTATCTACACCAACGTGACCTATCCCATTACGGTCAATCCGCCGTTTGTTCCC
GCGGAGAATCCGACAGGTTGTTACTCGCTCACATTTAATATTGATGAAAGCTGGCTACA
GGAAGGCCAGACGCGAATTATTTTTGATGGCGTTAACTCGGCGTTTCATCTGTGGTGCA
ACGGGCGCTGGGTCGGTTACGGCCAGGACAGCCGTTTGCCGTCTGAATTTGACCTGAGC
GCATTTTTACGCGCCGGAGAAAACCGCCTCGCGGTGATGGTGCTGCGCTGGAGTGACGG
CAGTTATCTGGAAGATCAGGATATGTGGCGGATGAGCGGCATTTTCCGTGACGTCTCGT
TGCTGCATAAACCGACCACGCAAATCAGCGATTTCCAAGTTACCACTCTCTTTAATGAT
GATTTCAGCCGCGCGGTACTGGAGGCAGAAGTTCAGATGTACGGCGAGCTGCGCGATGA
ACTGCGGGTGACGGTTTCTTTGTGGCAGGGTGAAACGCAGGTCGCCAGCGGCACCGCGC
CTTTCGGCGGTGAAATTATCGATGAGCGTGGCGGTTATGCCGATCGCGTCACACTACGC
CTGAACGTTGAAAATCCGGAACTGTGGAGCGCCGAAATCCCGAATCTCTATCGTGCAGT
GGTTGAACTGCACACCGCCGACGGCACGCTGATTGAAGCAGAAGCCTGCGACGTCGGTT
TCCGCGAGGTGCGGATTGAAAATGGTCTGCTGCTGCTGAACGGCAAGCCGTTGCTGATT
CGCGGCGTTAACCGTCACGAGCATCATCCTCTGCATGGTCAGGTCATGGATGAGCAGAC
GATGGTGCAGGATATCCTGCTGATGAAGCAGAACAACTTTAACGCCGTGCGCTGTTCGC
ATTATCCGAACCATCCGCTGTGGTACACGCTGTGCGACCGCTACGGCCTGTATGTGGTG
GATGAAGCCAATATTGAAACCCACGGCATGGTGCCAATGAATCGTCTGACCGATGATCC
GCGCTGGCTACCCGCGATGAGCGAACGCGTAACGCGGATGGTGCAGCGCGATCGTAATC
ACCCGAGTGTGATCATCTGGTCGCTGGGGAATGAATCAGGCCACGGCGCTAATCACGAC
GCGCTGTATCGCTGGATCAAATCTGTCGATCCTTCCCGCCCGGTACAGTATGAAGGCGG
CGGAGCCGACACCACGGCCACCGATATTATTTGCCCGATGTACGCGCGCGTGGATGAAG
ACCAGCCCTTCCCGGCGGTGCCGAAATGGTCCATCAAAAAATGGCTTTCGCTGCCTGGA
GAAATGCGCCCGCTGATCCTTTGCGAATATGCCCACGCGATGGGTAACAGTCTTGGCGG
CTTCGCTAAATACTGGCAGGCGTTTCGTCAGTACCCCCGTTTACAGGGCGGCTTCGTCT
GGGACTGGGTGGATCAGTCGCTGATTAAATATGATGAAAACGGCAACCCGTGGTCGGCT
TACGGCGGTGATTTTGGCGATACGCCGAACGATCGCCAGTTCTGTATGAACGGTCTGGT
CTTTGCCGACCGCACGCCGCATCCGGCGCTGACGGAAGCAAAACACCAACAGCAGTATT
TCCAGTTCCGTTTATCCGGGCGAACCATCGAAGTGACCAGCGAATACCTGTTCCGTCAT
AGCGATAACGAGTTCCTGCACTGGATGGTGGCACTGGATGGCAAGCCGCTGGCAAGCGG
TGAAGTGCCTCTGGATGTTGGCCCGCAAGGTAAGCAGTTGATTGAACTGCCTGAACTGC
CGCAGCCGGAGAGCGCCGGACAACTCTGGCTAACGGTACGCGTAGTGCAACCAAACGCG
ACCGCATGGTCAGAAGCCGGACACATCAGCGCCTGGCAGCAATGGCGTCTGGCGGAAAA
CCTCAGCGTGACACTCCCCTCCGCGTCCCACGCCATCCCTCAACTGACCACCAGCGGAA
CGGATTTTTGCATCGAGCTGGGTAATAAGCGTTGGCAATTTAACCGCCAGTCAGGCTTT
CTTTCACAGATGTGGATTGGCGATGAAAAACAACTGCTGACCCCGCTGCGCGATCAGTT
CACCCGTGCGCCGCTGGATAACGACATTGGCGTAAGTGAAGCGACCCGCATTGACCCTA
ACGCCTGGGTCGAACGCTGGAAGGCGGCGGGCCATTACCAGGCCGAAGCGGCGTTGTTG
CAGTGCACGGCAGATACACTTGCCGACGCGGTGCTGATTACAACCGCCCACGCGTGGCA
GCATCAGGGGAAAACCTTATTTATCAGCCGGAAAACCTACCGGATTGATGGGCACGGTG
AGATGGTCATCAATGTGGATGTTGCGGTGGCAAGCGATACACCGCATCCGGCGCGGATT
GGCCTGACCTGCCAGCTGGCGCAGGTCTCAGAGCGGGTAAACTGGCTCGGCCTGGGGCC
GCAAGAAAACTATCCCGACCGCCTTACTGCAGCCTGTTTTGACCGCTGGGATCTGCCAT
TGTCAGACATGTATACCCCGTACGTCTTCCCGAGCGAAAACGGTCTGCGCTGCGGGACG
CGCGAATTGAATTATGGCCCACACCAGTGGCGCGGCGACTTCCAGTTCAACATCAGCCG
CTACAGCCAACAACAACTGATGGAAACCAGCCATCGCCATCTGCTGCACGCGGAAGAAG
GCACATGGCTGAATATCGACGGTTTCCATATGGGGATTGGTGGCGACGACTCCTGGAGC
CCGTCAGTATCGGCGGAATTCCAGCTGAGCGCCGGTCGCTACCATTACCAGTTGGTCTG
GTGTCAAAAATAA

TABLE 56
Pfnr3-lacZ construct Sequences
Nucleotide sequences of Pfnr3-lacZ construct, low-copy
(SEQ ID NO: 252)

GGTACCgtcagcataacaccctgacctctcattaattgttcatgccgggcggcact
atcgtcgtccggccttttcctctcttactctgctacgtacatctatttctataaat
ccgttcaatttgtctgttttttgcacaaacatgaaatatcagacaattccgtgact
taagaaaatttatacaaatcagcaatataccccttaaggagtatataaaggtgaat
ttgatttacatcaataagcggggttgctgaatcgttaaGGATCCctctagaaataa
ttttgtttaactttaagaaggagatatacatATGACTATGATTACGGATTCTCTGG
CCGTCGTATTACAACGTCGTGACTGGGAAAACCCTGGCGTTACCCAACTTAATCGC
CTTGCGGCACATCCCCCTTTCGCCAGCTGGCGTAATAGCGAAGAGGCCCGCACCGA
TCGCCCTTCCCAACAGTTGCGCAGCCTGAATGGCGAATGGCGCTTTGCCTGGTTTC
CGGCACCAGAAGCGGTGCCGGAAAGCTGGCTGGAGTGCGATCTTCCTGACGCCGAT
ACTGTCGTCGTCCCCTCAAACTGGCAGATGCACGGTTACGATGCGCCTATCTACAC
CAACGTGACCTATCCCATTACGGTCAATCCGCCGTTTGTTCCCGCGGAGAATCCGA
CAGGTTGTTACTCGCTCACATTTAATATTGATGAAAGCTGGCTACAGGAAGGCCAG
ACGCGAATTATTTTTGATGGCGTTAACTCGGCGTTTCATCTGTGGTGCAACGGGCG
CTGGGTCGGTTACGGCCAGGACAGCCGTTTGCCGTCTGAATTTGACCTGAGCGCAT
TTTTACGCGCCGGAGAAAACCGCCTCGCGGTGATGGTGCTGCGCTGGAGTGACGGC
AGTTATCTGGAAGATCAGGATATGTGGCGGATGAGCGGCATTTTCCGTGACGTCTC
GTTGCTGCATAAACCGACCACGCAAATCAGCGATTTCCAAGTTACCACTCTCTTTA
ATGATGATTTCAGCCGCGCGGTACTGGAGGCAGAAGTTCAGATGTACGGCGAGCTG
CGCGATGAACTGCGGGTGACGGTTTCTTTGTGGCAGGGTGAAACGCAGGTCGCCAG
CGGCACCGCGCCTTTCGGCGGTGAAATTATCGATGAGCGTGGCGGTTATGCCGATC
GCGTCACACTACGCCTGAACGTTGAAAATCCGGAACTGTGGAGCGCCGAAATCCCG
AATCTCTATCGTGCAGTGGTTGAACTGCACACCGCCGACGGCACGCTGATTGAAGC
AGAAGCCTGCGACGTCGGTTTCCGCGAGGTGCGGATTGAAAATGGTCTGCTGCTGC
TGAACGGCAAGCCGTTGCTGATTCGCGGCGTTAACCGTCACGAGCATCATCCTCTG
CATGGTCAGGTCATGGATGAGCAGACGATGGTGCAGGATATCCTGCTGATGAAGCA
GAACAACTTTAACGCCGTGCGCTGTTCGCATTATCCGAACCATCCGCTGTGGTACA
CGCTGTGCGACCGCTACGGCCTGTATGTGGTGGATGAAGCCAATATTGAAACCCAC
GGCATGGTGCCAATGAATCGTCTGACCGATGATCCGCGCTGGCTACCCGCGATGAG
CGAACGCGTAACGCGGATGGTGCAGCGCGATCGTAATCACCCGAGTGTGATCATCT
GGTCGCTGGGGAATGAATCAGGCCACGGCGCTAATCACGACGCGCTGTATCGCTGG
ATCAAATCTGTCGATCCTTCCCGCCCGGTACAGTATGAAGGCGGCGGAGCCGACAC
CACGGCCACCGATATTATTTGCCCGATGTACGCGCGCGTGGATGAAGACCAGCCCT
TCCCGGCGGTGCCGAAATGGTCCATCAAAAAATGGCTTTCGCTGCCTGGAGAAATG
CGCCCGCTGATCCTTTGCGAATATGCCCACGCGATGGGTAACAGTCTTGGCGGCTT
CGCTAAATACTGGCAGGCGTTTCGTCAGTACCCCCGTTTACAGGGCGGCTTCGTCT
GGGACTGGGTGGATCAGTCGCTGATTAAATATGATGAAAACGGCAACCCGTGGTCG
GCTTACGGCGGTGATTTTGGCGATACGCCGAACGATCGCCAGTTCTGTATGAACGG
TCTGGTCTTTGCCGACCGCACGCCGCATCCGGCGCTGACGGAAGCAAAACACCAAC
AGCAGTATTTCCAGTTCCGTTTATCCGGGCGAACCATCGAAGTGACCAGCGAATAC
CTGTTCCGTCATAGCGATAACGAGTTCCTGCACTGGATGGTGGCACTGGATGGCAA
GCCGCTGGCAAGCGGTGAAGTGCCTCTGGATGTTGGCCCGCAAGGTAAGCAGTTGA
TTGAACTGCCTGAACTGCCGCAGCCGGAGAGCGCCGGACAACTCTGGCTAACGGTA
CGCGTAGTGCAACCAAACGCGACCGCATGGTCAGAAGCCGGACACATCAGCGCCTG
GCAGCAATGGCGTCTGGCGGAAAACCTCAGCGTGACACTCCCCTCCGCGTCCCACG
CCATCCCTCAACTGACCACCAGCGGAACGGATTTTTGCATCGAGCTGGGTAATAAG
CGTTGGCAATTTAACCGCCAGTCAGGCTTTCTTTCACAGATGTGGATTGGCGATGA
AAAACAACTGCTGACCCCGCTGCGCGATCAGTTCACCCGTGCGCCGCTGGATAACG
ACATTGGCGTAAGTGAAGCGACCCGCATTGACCCTAACGCCTGGGTCGAACGCTGG
AAGGCGGCGGGCCATTACCAGGCCGAAGCGGCGTTGTTGCAGTGCACGGCAGATAC
ACTTGCCGACGCGGTGCTGATTACAACCGCCCACGCGTGGCAGCATCAGGGGAAAA
CCTTATTTATCAGCCGGAAAACCTACCGGATTGATGGGCACGGTGAGATGGTCATC
AATGTGGATGTTGCGGTGGCAAGCGATACACCGCATCCGGCGCGGATTGGCCTGAC
CTGCCAGCTGGCGCAGGTCTCAGAGCGGGTAAACTGGCTCGGCCTGGGGCCGCAAG
AAAACTATCCCGACCGCCTTACTGCAGCCTGTTTTGACCGCTGGGATCTGCCATTG
TCAGACATGTATACCCCGTACGTCTTCCCGAGCGAAAACGGTCTGCGCTGCGGGAC
GCGCGAATTGAATTATGGCCCACACCAGTGGCGCGGCGACTTCCAGTTCAACATCA
GCCGCTACAGCCAACAACAACTGATGGAAACCAGCCATCGCCATCTGCTGCACGCG
GAAGAAGGCACATGGCTGAATATCGACGGTTTCCATATGGGGATTGGTGGCGACGA
CTCCTGGAGCCCGTCAGTATCGGCGGAATTCCAGCTGAGCGCCGGTCGCTACCATT
ACCAGTTGGTCTGGTGTCAAAAATAA

TABLE 57
Pfnr4-lacZ construct Sequences
Nucleotide sequences of Pfnr4-lacZ construct, low-copy
(SEQ ID NO: 253)

GGTACCcatttcctctcatcccatccggggtgagagtcttttcccccgacttatgg
ctcatgcatgcatcaaaaaagatgtgagcttgatcaaaaacaaaaaatatttcact
cgacaggagtatttatattgcgcccGGATCCctctagaaataattttgtttaactt
taagaaggagatatacatATGACTATGATTACGGATTCTCTGGCCGTCGTATTACA
ACGTCGTGACTGGGAAAACCCTGGCGTTACCCAACTTAATCGCCTTGCGGCACATC
CCCCTTTCGCCAGCTGGCGTAATAGCGAAGAGGCCCGCACCGATCGCCCTTCCCAA
CAGTTGCGCAGCCTGAATGGCGAATGGCGCTTTGCCTGGTTTCCGGCACCAGAAGC
GGTGCCGGAAAGCTGGCTGGAGTGCGATCTTCCTGACGCCGATACTGTCGTCGTCC
CCTCAAACTGGCAGATGCACGGTTACGATGCGCCTATCTACACCAACGTGACCTAT
CCCATTACGGTCAATCCGCCGTTTGTTCCCGCGGAGAATCCGACAGGTTGTTACTC
GCTCACATTTAATATTGATGAAAGCTGGCTACAGGAAGGCCAGACGCGAATTATTT
TTGATGGCGTTAACTCGGCGTTTCATCTGTGGTGCAACGGGCGCTGGGTCGGTTAC
GGCCAGGACAGCCGTTTGCCGTCTGAATTTGACCTGAGCGCATTTTTACGCGCCGG
AGAAAACCGCCTCGCGGTGATGGTGCTGCGCTGGAGTGACGGCAGTTATCTGGAAG
ATCAGGATATGTGGCGGATGAGCGGCATTTTCCGTGACGTCTCGTTGCTGCATAAA
CCGACCACGCAAATCAGCGATTTCCAAGTTACCACTCTCTTTAATGATGATTTCAG
CCGCGCGGTACTGGAGGCAGAAGTTCAGATGTACGGCGAGCTGCGCGATGAACTGC
GGGTGACGGTTTCTTTGTGGCAGGGTGAAACGCAGGTCGCCAGCGGCACCGCGCCT
TTCGGCGGTGAAATTATCGATGAGCGTGGCGGTTATGCCGATCGCGTCACACTACG
CCTGAACGTTGAAAATCCGGAACTGTGGAGCGCCGAAATCCCGAATCTCTATCGTG
CAGTGGTTGAACTGCACACCGCCGACGGCACGCTGATTGAAGCAGAAGCCTGCGAC
GTCGGTTTCCGCGAGGTGCGGATTGAAAATGGTCTGCTGCTGCTGAACGGCAAGCC
GTTGCTGATTCGCGGCGTTAACCGTCACGAGCATCATCCTCTGCATGGTCAGGTCA
TGGATGAGCAGACGATGGTGCAGGATATCCTGCTGATGAAGCAGAACAACTTTAAC
GCCGTGCGCTGTTCGCATTATCCGAACCATCCGCTGTGGTACACGCTGTGCGACCG
CTACGGCCTGTATGTGGTGGATGAAGCCAATATTGAAACCCACGGCATGGTGCCAA
TGAATCGTCTGACCGATGATCCGCGCTGGCTACCCGCGATGAGCGAACGCGTAACG
CGGATGGTGCAGCGCGATCGTAATCACCCGAGTGTGATCATCTGGTCGCTGGGGAA
TGAATCAGGCCACGGCGCTAATCACGACGCGCTGTATCGCTGGATCAAATCTGTCG
ATCCTTCCCGCCCGGTACAGTATGAAGGCGGCGGAGCCGACACCACGGCCACCGAT
ATTATTTGCCCGATGTACGCGCGCGTGGATGAAGACCAGCCCTTCCCGGCGGTGCC
GAAATGGTCCATCAAAAAATGGCTTTCGCTGCCTGGAGAAATGCGCCCGCTGATCC
TTTGCGAATATGCCCACGCGATGGGTAACAGTCTTGGCGGCTTCGCTAAATACTGG
CAGGCGTTTCGTCAGTACCCCCGTTTACAGGGCGGCTTCGTCTGGGACTGGGTGGA
TCAGTCGCTGATTAAATATGATGAAAACGGCAACCCGTGGTCGGCTTACGGCGGTG
ATTTTGGCGATACGCCGAACGATCGCCAGTTCTGTATGAACGGTCTGGTCTTTGCC
GACCGCACGCCGCATCCGGCGCTGACGGAAGCAAAACACCAACAGCAGTATTTCCA
GTTCCGTTTATCCGGGCGAACCATCGAAGTGACCAGCGAATACCTGTTCCGTCATA
GCGATAACGAGTTCCTGCACTGGATGGTGGCACTGGATGGCAAGCCGCTGGCAAGC
GGTGAAGTGCCTCTGGATGTTGGCCCGCAAGGTAAGCAGTTGATTGAACTGCCTGA
ACTGCCGCAGCCGGAGAGCGCCGGACAACTCTGGCTAACGGTACGCGTAGTGCAAC
CAAACGCGACCGCATGGTCAGAAGCCGGACACATCAGCGCCTGGCAGCAATGGCGT
CTGGCGGAAAACCTCAGCGTGACACTCCCCTCCGCGTCCCACGCCATCCCTCAACT
GACCACCAGCGGAACGGATTTTTGCATCGAGCTGGGTAATAAGCGTTGGCAATTTA
ACCGCCAGTCAGGCTTTCTTTCACAGATGTGGATTGGCGATGAAAAACAACTGCTG
ACCCCGCTGCGCGATCAGTTCACCCGTGCGCCGCTGGATAACGACATTGGCGTAAG
TGAAGCGACCCGCATTGACCCTAACGCCTGGGTCGAACGCTGGAAGGCGGCGGGCC
ATTACCAGGCCGAAGCGGCGTTGTTGCAGTGCACGGCAGATACACTTGCCGACGCG
GTGCTGATTACAACCGCCCACGCGTGGCAGCATCAGGGGAAAACCTTATTTATCAG
CCGGAAAACCTACCGGATTGATGGGCACGGTGAGATGGTCATCAATGTGGATGTTG
CGGTGGCAAGCGATACACCGCATCCGGCGCGGATTGGCCTGACCTGCCAGCTGGCG
CAGGTCTCAGAGCGGGTAAACTGGCTCGGCCTGGGGCCGCAAGAAAACTATCCCGA
CCGCCTTACTGCAGCCTGTTTTGACCGCTGGGATCTGCCATTGTCAGACATGTATA
CCCCGTACGTCTTCCCGAGCGAAAACGGTCTGCGCTGCGGGACGCGCGAATTGAAT
TATGGCCCACACCAGTGGCGCGGCGACTTCCAGTTCAACATCAGCCGCTACAGCCA
ACAACAACTGATGGAAACCAGCCATCGCCATCTGCTGCACGCGGAAGAAGGCACAT
GGCTGAATATCGACGGTTTCCATATGGGGATTGGTGGCGACGACTCCTGGAGCCCG
TCAGTATCGGCGGAATTCCAGCTGAGCGCCGGTCGCTACCATTACCAGTTGGTCTG
GTGTCAAAAATAA

TABLE 58
Pfnrs-lacZ construct Sequences
Nucleotide sequences of Pfnrs-lacZ construct, low-copy
(SEQ ID NO: 254)

GGTACCagttgttcttattggtggtgttgctttatggttgcatcgtagtaaatggttgt
aacaaaagcaatttttccggctgtctgtatacaaaaacgccgtaaagtttgagcgaagt
caataaactctctacccattcagggcaatatctctcttGGATCCctctagaaataattt
tgtttaactttaagaaggagatatacatATGCTATGATTACGGATTCTCTGGCCGTCGT
ATTACAACGTCGTGACTGGGAAAACCCTGGCGTTACCCAACTTAATCGCCTTGCGGCAC
ATCCCCCTTTCGCCAGCTGGCGTAATAGCGAAGAGGCCCGCACCGATCGCCCTTCCCAA
CAGTTGCGCAGCCTGAATGGCGAATGGCGCTTTGCCTGGTTTCCGGCACCAGAAGCGGT
GCCGGAAAGCTGGCTGGAGTGCGATCTTCCTGACGCCGATACTGTCGTCGTCCCCTCAA
ACTGGCAGATGCACGGTTACGATGCGCCTATCTACACCAACGTGACCTATCCCATTACG
GTCAATCCGCCGTTTGTTCCCGCGGAGAATCCGACAGGTTGTTACTCGCTCACATTTAA
TATTGATGAAAGCTGGCTACAGGAAGGCCAGACGCGAATTATTTTTGATGGCGTTAACT
CGGCGTTTCATCTGTGGTGCAACGGGCGCTGGGTCGGTTACGGCCAGGACAGCCGTTTG
CCGTCTGAATTTGACCTGAGCGCATTTTTACGCGCCGGAGAAAACCGCCTCGCGGTGAT
GGTGCTGCGCTGGAGTGACGGCAGTTATCTGGAAGATCAGGATATGTGGCGGATGAGCG
GCATTTTCCGTGACGTCTCGTTGCTGCATAAACCGACCACGCAAATCAGCGATTTCCAA
GTTACCACTCTCTTTAATGATGATTTCAGCCGCGCGGTACTGGAGGCAGAAGTTCAGAT
GTACGGCGAGCTGCGCGATGAACTGCGGGTGACGGTTTCTTTGTGGCAGGGTGAAACGC
AGGTCGCCAGCGGCACCGCGCCTTTCGGCGGTGAAATTATCGATGAGCGTGGCGGTTAT
GCCGATCGCGTCACACTACGCCTGAACGTTGAAAATCCGGAACTGTGGAGCGCCGAAAT
CCCGAATCTCTATCGTGCAGTGGTTGAACTGCACACCGCCGACGGCACGCTGATTGAAG
CAGAAGCCTGCGACGTCGGTTTCCGCGAGGTGCGGATTGAAAATGGTCTGCTGCTGCTG
AACGGCAAGCCGTTGCTGATTCGCGGCGTTAACCGTCACGAGCATCATCCTCTGCATGG
TCAGGTCATGGATGAGCAGACGATGGTGCAGGATATCCTGCTGATGAAGCAGAACAACT
TTAACGCCGTGCGCTGTTCGCATTATCCGAACCATCCGCTGTGGTACACGCTGTGCGAC
CGCTACGGCCTGTATGTGGTGGATGAAGCCAATATTGAAACCCACGGCATGGTGCCAAT
GAATCGTCTGACCGATGATCCGCGCTGGCTACCCGCGATGAGCGAACGCGTAACGCGGA
TGGTGCAGCGCGATCGTAATCACCCGAGTGTGATCATCTGGTCGCTGGGGAATGAATCA
GGCCACGGCGCTAATCACGACGCGCTGTATCGCTGGATCAAATCTGTCGATCCTTCCCG
CCCGGTACAGTATGAAGGCGGCGGAGCCGACACCACGGCCACCGATATTATTTGCCCGA
TGTACGCGCGCGTGGATGAAGACCAGCCCTTCCCGGCGGTGCCGAAATGGTCCATCAAA
AAATGGCTTTCGCTGCCTGGAGAAATGCGCCCGCTGATCCTTTGCGAATATGCCCACGC
GATGGGTAACAGTCTTGGCGGCTTCGCTAAATACTGGCAGGCGTTTCGTCAGTACCCCC
GTTTACAGGGCGGCTTCGTCTGGGACTGGGTGGATCAGTCGCTGATTAAATATGATGAA
AACGGCAACCCGTGGTCGGCTTACGGCGGTGATTTTGGCGATACGCCGAACGATCGCCA
GTTCTGTATGAACGGTCTGGTCTTTGCCGACCGCACGCCGCATCCGGCGCTGACGGAAG
CAAAACACCAACAGCAGTATTTCCAGTTCCGTTTATCCGGGCGAACCATCGAAGTGACC
AGCGAATACCTGTTCCGTCATAGCGATAACGAGTTCCTGCACTGGATGGTGGCACTGGA
TGGCAAGCCGCTGGCAAGCGGTGAAGTGCCTCTGGATGTTGGCCCGCAAGGTAAGCAGT
TGATTGAACTGCCTGAACTGCCGCAGCCGGAGAGCGCCGGACAACTCTGGCTAACGGTA
CGCGTAGTGCAACCAAACGCGACCGCATGGTCAGAAGCCGGACACATCAGCGCCTGGCA
GCAATGGCGTCTGGCGGAAAACCTCAGCGTGACACTCCCCTCCGCGTCCCACGCCATCC
CTCAACTGACCACCAGCGGAACGGATTTTTGCATCGAGCTGGGTAATAAGCGTTGGCAA
TTTAACCGCCAGTCAGGCTTTCTTTCACAGATGTGGATTGGCGATGAAAAACAACTGCT
GACCCCGCTGCGCGATCAGTTCACCCGTGCGCCGCTGGATAACGACATTGGCGTAAGTG
AAGCGACCCGCATTGACCCTAACGCCTGGGTCGAACGCTGGAAGGCGGCGGGCCATTAC
CAGGCCGAAGCGGCGTTGTTGCAGTGCACGGCAGATACACTTGCCGACGCGGTGCTGAT
TACAACCGCCCACGCGTGGCAGCATCAGGGGAAAACCTTATTTATCAGCCGGAAAACCT
ACCGGATTGATGGGCACGGTGAGATGGTCATCAATGTGGATGTTGCGGTGGCAAGCGAT
ACACCGCATCCGGCGCGGATTGGCCTGACCTGCCAGCTGGCGCAGGTCTCAGAGCGGGT
AAACTGGCTCGGCCTGGGGCCGCAAGAAAACTATCCCGACCGCCTTACTGCAGCCTGTT
TTGACCGCTGGGATCTGCCATTGTCAGACATGTATACCCCGTACGTCTTCCCGAGCGAA
AACGGTCTGCGCTGCGGGACGCGCGAATTGAATTATGGCCCACACCAGTGGCGCGGCGA
CTTCCAGTTCAACATCAGCCGCTACAGCCAACAACAACTGATGGAAACCAGCCATCGCC
ATCTGCTGCACGCGGAAGAAGGCACATGGCTGAATATCGACGGTTTCCATATGGGGATT
GGTGGCGACGACTCCTGGAGCCCGTCAGTATCGGCGGAATTCCAGCTGAGCGCCGGTCG
CTACCATTACCAGTTGGTCTGGTGTCAAAAATAA

### Example 35

### Increasing in vitro Butyrate and Acetate Production in Engineered Nissle

[1111] E. coli generates high levels of acetate as an end product of fermentation. In order to improve acetate production while also maintaining high levels butyrate production, deletions in endogenous adhE (Aldehyde-alcohol dehydrogenase) and 1 dh (lactate dehydrogenase) were generated to prevent or reduce metabolic flux through pathways which do not result in acetate or butyrate production (see, e.g., FIG. 14). For this study, Nissle strains with either integrated FNRS ter-tesB or FNRS-ter-pbt-buk butyrate cassettes were used. Additionally, for this study media M9 media containing 50 mM MOPS with 0.5% glucose was comparedto media containing 0.5/% glucuronic acid, as glucuronic acid better mimics available carbon sources in the gut.

[1112] Briefly, bacteria were grown overnight at 37 C with shaking. Overnight cultures were diluted 1:100 into 10 ml LB (containing antibiotics) in a 125 ml baffled flask. Cultures were grown aerobically at 37 C with shaking for about 1.5 h, and then transferred to the anaerobic chamber at 37 C for 4 h. Bacteria (2×10⁸ CFU) were added to 1 ml M9 media containing 50 mM MOPS with 0.5% glucose or 0.5% glucuronic acid in microcentrifuge tubes. Cells were plated to determine cell counts. The assay tubes were placed in the anaerobic chamber at 37 C. At 18 hours, cells were removed and pelleted at 14,000 rpm for 1 min, and 100 ul of the supernatant was transferred to a 96-well assay plate and sealed with aluminum foil, and stored at -80 C until analysis by LC-MS for butyrate and acetate concentrations as described herein in Example 18 and Example 21.

[1113] As seen in FIG. 14A and FIG. 14B, both integrated strains made similar amounts of acetate, and FNRS-ter-pbt-buk butyrate cassettes produced slightly more butyrate. Deletions in adhE and ldhA have similar effects on butyrate and acetate production. Acetate production was much greater in media containing 0.5% glucuronic acid.

[1114] In alternate embodiments, frd (fumarate reductase) is deleted to assess the effect of the deletion on acetate and butyrate production.

### Example 36

### Generation of Indole Propionic Acid Strain and In Vitro indole Production

[1115] To facilitate inducible production of indole propionic acid (IPA) in Escherichia coli Nissle, 6 genes allowing the production of indole propionic acid from tryptophan, as well as transcriptional and translational elements, are synthesized (Gen9, Cambridge, Mass.) and cloned into vector pBR322 under a tet inducible promoter. In other embodiments, the IPA synthesis cassette is put under the control of an FNR, RNS or ROS promoter, e.g., described herein, or other promoter induced by conditions in the healthy or diseased gut, e.g., inflammatory conditions. For efficient translation of IPA synthesis genes, each synthetic gene in the cassette is separated by a 15 base pair ribosome binding site derived from the T7 promoter/translational start site.

[1116] The IPA synthesis cassette comprises TrpDH (tryptophan dehydrogenase from Nostoc punctiforme NIES-2108), FldH1/F1dH2 (indole-3-lactate dehydrogenase from Clostridium sporogenes), FldA (indole-3-propionyl-CoA: indole-3-lactate CoA transferase from Clostridium sporogenes), FldBC (indole-3-lactate dehydratase from Clostridium sporogenes), FldD (indole-3-acrylyl-CoA reductase from Clostridium sporogenes), and Acul (acrylyl-CoA reductase from Rhodobacter sphaeroides).

[1117] The tet inducible IPA construct described above is transformed into E. coli Nissle as described herein and production of IPA is assessed. In certain embodiments, E. coli Nissle strains containing the IPA synthesis cassette described further comprise a tryptophan synthesis cassette. In certain embodiments, the strains comprise a feedback resistant version of AroG and TrpE to achieve greater Trp production. In certain embodiments, additionally, the tnaA gene (tryptophanase converting Trp into indole) is deleted.

[1118] All incubations are performed at 37° C. LB-grown overnight cultures of E. coli Nissle transformed with the IPA biosynthesis construct alone or in combination with a tryptophan biosynthesis construct and feedback resistant AroG and TrpE are subcultured 1:100 into 10 mL of M9 minimal medium containing 0.5% glucose and grown shaking (200 rpm) for 2 h, at which time anhydrous tetracycline (ATC) is added to cultures at a concentration of 100 ng/mL to induce expression of the IPA biosynthesis and tryptophan biosynthesis constructs. After 2 hours of induction, cells are spun down, supernatant is discarded, and the cells are resuspended in M9 minimal media containing 0.5% glucose. Culture supernatant is then analyzed at predetermined time points (e.g., 0 up to 24 hours) by LC-MS to assess levels of IPA.

[1119] Production of IPA is also assessed in E. coli Nissle strains containing the IPA and tryptophan cassettes both driven by an RNS promoter e.g., a nsrR-norB-IPA biosynthesis construct) in order to assess nitrogen dependent induction of IPA production. Overnight bacterial cultures are diluted 1:100 into fresh LB and grown for 1.5 hrs to allow entry into early log phase. At this point, long half-life nitric oxide donor (DETA-NO; diethylenetriamine-nitric oxide adduct) was added to cultures at a final concentration of 0.3 mM to induce expression from plasmid. After 2 hours of induction, cells are spun down, supernatant is discarded, and the cells are resuspended in M9 minimal media containing 0.5% glucose. Culture supernatant is then analyzed at predetermined time points (0 up to 24 hours) to assess IPA levels.

[1120] In alternate embodiments, production of IPA is also assessed in E. coli Nissle strains containing the IPA and tryptophan cassettes both driven by the low oxygen inducible FNR promoter, e.g., FNRS, or the reactive oxygen regulated OxyS promoter.

### Example 37

### Synthesis of Constructs for Synthesis of Tryptophan, Tryptamine, and Other Indole Metabolites

[1121] Various constructs were synthesized, and cloned into vector pBR322 for transformation of E. coli . In some embodiments, the constructs encoding the effector molecules are integrated into the genome according to methods described herein, e.g., Example 2.

TABLE 59
Sequences

| Description | Sequence |
|---|---|
| fbrAroG (RBS and | Ctctagaaataattttgtttaactttaagaaggagatatacat |
| leader region | atgaattatcagaacgacgatttacgcatcaaagaaatcaaagagttacttcctcctgtcg |
| underlined) | cattgctggaaaaattccccgctactgaaaatgccgcgaatacggtcgcccatgcccga |
| SEQ ID NO: 255 | aaagcgatccataagatcctgaaaggtaatgatgatcgcctgttggtggtgattggccca |
| | tgctcaattcatgatcctgtcgcggctaaagagtatgccactcgcttgctgacgctgcgtg |
| | aagagctgcaagatgagctggaaatcgtgatgcgcgtctattttgaaaagccgcgtacta |
| | cggtgggctggaaagggctgattaacgatccgcatatggataacagcttccagatcaac |
| | gacggtctgcgtattgcccgcaaattgctgctcgatattaacgacagcggtctgccagcg |
| | gcgggtgaattcctggatatgatcaccctacaatatctcgctgacctgatgagctggggc |
| | gcaattggcgcacgtaccaccgaatcgcaggtgcaccgcgaactggcgtctggtctttc |
| | ttgtccggtaggtttcaaaaatggcactgatggtacgattaaagtggctatcgatgccatta |
| | atgccgccggtgcgccgcactgcttcctgtccgtaacgaaatgggggcattcggcgatt |
| | gtgaataccagcggtaacggcgattgccatatcattctgcgcggcggtaaagagcctaa |
| | ctacagcgcgaagcacgttgctgaagtgaaagaagggctgaacaaagcaggcctgcc |
| | agcgcaggtgatgatcgatttcagccatgctaactcgtcaaaacaattcaaaaagcagat |
| | ggatgtttgtactgacgtttgccagcagattgccggtggcgaaaaggccattattggcgt |
| | gatggtggaaagccatctggtggaaggcaatcagagcctcgagagcggggaaccgct |
| | ggcctacggtaagagcatcaccgatgcctgcattggctgggatgataccgatgctctgtt |
| | acgtcaactggcgagtgcagtaaaagcgcgtcgcgggtaa |
| fbrAroG | atgaattatcagaacgacgatttacgcatcaaagaaatcaaagagttacttcctcctgtcg |
| SEQ ID NO: 256 | cattgctggaaaaattccccgctactgaaaatgccgcgaatacggtcgcccatgcccga |
| | aaagcgatccataagatcctgaaaggtaatgatgatcgcctgttggtggtgattggccca |
| | tgctcaattcatgatcctgtcgcggctaaagagtatgccactcgcttgctgacgctgcgtg |
| | aagagctgcaagatgagctggaaatcgtgatgcgcgtctattttgaaaagccgcgtacta |
| | cggtgggctggaaagggctgattaacgatccgcatatggataacagcttccagatcaac |
| | gacggtctgcgtattgcccgcaaattgctgctcgatattaacgacagcggtctgccagcg |
| | gcgggtgaattcctggatatgatcaccctacaatatctcgctgacctgatgagctggggc |
| | gcaattggcgcacgtaccaccgaatcgcaggtgcaccgcgaactggcgtctggtctttc |
| | ttgtccggtaggtttcaaaaatggcactgatggtacgattaaagtggctatcgatgccatta |
| | atgccgccggtgcgccgcactgcttcctgtccgtaacgaaatgggggcattcggcgatt |
| | gtgaataccagcggtaacggcgattgccatatcattctgcgcggcggtaaagagcctaa |
| | ctacagcgcgaagcacgttgctgaagtgaaagaagggctgaacaaagcaggcctgcc |
| | agcgcaggtgatgatcgatttcagccatgctaactcgtcaaaacaattcaaaaagcagat |
| | ggatgtttgtactgacgtttgccagcagattgccggtggcgaaaaggccattattggcgt |
| | gatggtggaaagccatctggtggaaggcaatcagagcctcgagagcggggaaccgct |
| | ggcctacggtaagagcatcaccgatgcctgcattggctgggatgataccgatgctctgtt |
| | acgtcaactggcgagtgcagtaaaagcgcgtcgcgggtaa |
| fbrAroG-serA | Ctctagaaataattttgtttaactttaagaaggagatatacatatgaattatcagaacgacg |
| (RBS and leader | atttacgcatcaaagaaatcaaagagttacttcctcctgtcgcattgctggaaaaattcccc |
| region underlined; | gctactgaaaatgccgcgaatacggtcgcccatgcccgaaaagcgatccataagatcct |
| SerA starts after | gaaaggtaatgatgatcgcctgttggtggtgattggcccatgctcaattcatgatcctgtc |
| second RBS) | gcggctaaagagtatgccactcgcttgctgacgctgcgtgaagagctgcaagatgagct |
| SEQ ID NO: 257 | ggaaatcgtgatgcgcgtctattttgaaaagccgcgtactacggtgggctggaaagggc |
| | tgattaacgatccgcatatggataacagcttccagatcaacgacggtctgcgtattgccc |
| | gcaaattgctgctcgatattaacgacagcggtctgccagcggcgggtgaattcctggata |
| | tgatcaccctacaatatctcgctgacctgatgagctggggcgcaattggcgcacgtacca |
| | ccgaatcgcaggtgcaccgcgaactggcgtctggtctttcttgtccggtaggtttcaaaa |
| | atggcactgatggtacgattaaagtggctatcgatgccattaatgccgccggtgcgccgc |
| | actgcttcctgtccgtaacgaaatgggggcattcggcgattgtgaataccagcggtaacg |
| | gcgattgccatatcattctgcgcggcggtaaagagcctaactacagcgcgaagcacgtt |
| | gctgaagtgaaagaagggctgaacaaagcaggcctgccagcgcaggtgatgatcgat |
| | ttcagccatgctaactcgtcaaaacaattcaaaaagcagatggatgtttgtactgacgtttg |
| | ccagcagattgccggtggcgaaaaggccattattggcgtgatggtggaaagccatctg |
| | gtggaaggcaatcagagcctcgagagcggggaaccgctggcctacggtaagagcatc |
| | accgatgcctgcattggctgggatgataccgatgctctgttacgtcaactggcgagtgca |
| | gtaaaagcgcgtcgcgggtaaTACT |
| | taagaaggagatatacatatggcaaaggtatcgctggagaaagacaagattaagtttctg |
| | ctggtagaaggcgtgcaccaaaaggcgctggaaagccttcgtgcagctggttacacca |
| | acatcgaatttcacaaaggcgcgctggatgatgaacaattaaaagaatccatccgcgat |
| | gcccacttcatcggcctgcgatcccgtacccatctgactgaagacgtgatcaacgccgc |
| | agaaaaactggtcgctattggctgtttctgtatcggaacaaatcaggttgatctggatgcg |
| | gcggcaaagcgcgggatcccggtatttaacgcaccgttctcaaatacgcgctctgttgc |
| | ggagctggtgattggcgaactgctgctgctattgcgcggcgtgccagaagccaatgcta |
| | aagcgcatcgtggcgtgtggaacaaactggcggcgggttcttttgaagcgcgcggcaa |
| | aaagctgggtatcatcggctacggtcatattggtacgcaattgggcattctggctgaatcg |
| | ctgggaatgtatgtttacttttatgatattgaaaacaaactgccgctgggcaacgccactca |
| | ggtacagcatctttctgacctgctgaatatgagcgatgtggtgagtctgcatgtaccagag |
| | aatccgtccaccaaaaatatgatgggcgcgaaagagatttcgctaatgaagcccggctc |
| | gctgctgattaatgcttcgcgcggtactgtggtggatattccagcgctgtgtgacgcgctg |
| | gcgagcaaacatctggcgggggcggcaatcgacgtattcccgacggaaccggcgac |
| | caatagcgatccatttacctctccgctgtgtgaattcgacaatgtccttctgacgccacaca |
| | ttggcggttcgactcaggaagcgcaggagaatatcggcttggaagttgcgggtaaattg |
| | atcaagtattctgacaatggctcaacgctctctgcggtgaacttcccggaagtctcgctgc |
| | cactgcacggtgggcgtcgtctgatgcacatccacgaaaaccgtccgggcgtgctaact |
| | gcgctcaacaaaatttttgccgagcagggcgtcaacatcgccgcgcaatatctacaaact |
| | tccgcccagatgggttatgtagttattgatattgaagccgacgaagacgttgccgaaaaa |
| | gcgctgcaggcaatgaaagctattccgggtaccattcgcgcccgtctgctgtactaa |
| SerA | atggcaaaggtatcgctggagaaagacaagattaagtttctgctggtagaaggcgtgca |
| SEQ ID NO: 258 | ccaaaaggcgctggaaagccttcgtgcagctggttacaccaacatcgaatttcacaaag |
| | gcgcgctggatgatgaacaattaaaagaatccatccgcgatgcccacttcatcggcctg |
| | cgatcccgtacccatctgactgaagacgtgatcaacgccgcagaaaaactggtcgctat |
| | tggctgtttctgtatcggaacaaatcaggttgatctggatgcggcggcaaagcgcgggat |
| | cccggtatttaacgcaccgttctcaaatacgcgctctgttgcggagctggtgattggcga |
| | actgctgctgctattgcgcggcgtgccagaagccaatgctaaagcgcatcgtggcgtgt |
| | ggaacaaactggcggcgggttcttttgaagcgcgcggcaaaaagctgggtatcatcgg |
| | ctacggtcatattggtacgcaattgggcattctggctgaatcgctgggaatgtatgtttactt |
| | ttatgatattgaaaacaaactgccgctgggcaacgccactcaggtacagcatctttctgac |
| | ctgctgaatatgagcgatgtggtgagtctgcatgtaccagagaatccgtccaccaaaaat |
| | atgatgggcgcgaaagagatttcgctaatgaagcccggctcgctgctgattaatgcttcg |
| | cgcggtactgtggtggatattccagcgctgtgtgacgcgctggcgagcaaacatctggc |
| | gggggcggcaatcgacgtattcccgacggaaccggcgaccaatagcgatccatttacc |
| | tctccgctgtgtgaattcgacaatgtccttctgacgccacacattggcggttcgactcagg |
| | aagcgcaggagaatatcggcttggaagttgcgggtaaattgatcaagtattctgacaatg |
| | gctcaacgctctctgcggtgaacttcccggaagtctcgctgccactgcacggtgggcgt |
| | cgtctgatgcacatccacgaaaaccgtccgggcgtgctaactgcgctcaacaaaattttt |
| | gccgagcagggcgtcaacatcgccgcgcaatatctacaaacttccgcccagatgggtt |
| | atgtagttattgatattgaagccgacgaagacgttgccgaaaaagcgctgcaggcaatg |
| | aaagctattccgggtaccattcgcgcccgtctgctgtactaa |
| fbrAroG-Tdc (tdc | ctctagaaataattttgtttaactttaagaaggagatatacatatgaattatcagaacgacga |
| from C. roseus); | tttacgcatcaaagaaatcaaagagttacttcctcctgtcgcattgctggaaaaattccccg |
| RBS and leader | ctactgaaaatgccgcgaatacggtcgcccatgcccgaaaagcgatccataagatcctg |
| region underlined | aaaggtaatgatgatcgcctgttggtggtgattggcccatgctcaattcatgatcctgtcgc |
| SEQ ID NO: 259 | ggctaaagagtatgccactcgcttgctgacgctgcgtgaagagctgcaagatgagctgg |
| | aaatcgtgatgcgcgtctattttgaaaagccgcgtactacggtgggctggaaagggctg |
| | attaacgatccgcatatggataacagcttccagatcaacgacggtctgcgtattgcccgc |
| | aaattgctgctcgatattaacgacagcggtctgccagcggcgggtgaattcctggatatg |
| | atcaccctacaatatctcgctgacctgatgagctggggcgcaattggcgcacgtaccac |
| | cgaatcgcaggtgcaccgcgaactggcgtctggtctttcttgtccggtaggtttcaaaaat |
| | ggcactgatggtacgattaaagtggctatcgatgccattaatgccgccggtgcgccgca |
| | ctgcttcctgtccgtaacgaaatgggggcattcggcgattgtgaataccagcggtaacg |
| | gcgattgccatatcattctgcgcggcggtaaagagcctaactacagcgcgaagcacgtt |
| | gctgaagtgaaagaagggctgaacaaagcaggcctgccagcgcaggtgatgatcgat |
| | ttcagccatgctaactcgtcaaaacaattcaaaaagcagatggatgtttgtactgacgtttg |
| | ccagcagattgccggtggcgaaaaggccattattggcgtgatggtggaaagccatctg |
| | gtggaaggcaatcagagcctcgagagcggggaaccgctggcctacggtaagagcatc |
| | accgatgcctgcattggctgggatgataccgatgctctgttacgtcaactggcgagtgca |
| | gtaaaagcgcgtcgcgggtaaTACTtaagaaggagatatacatATGGGTTC |
| | TATTGACTCGACGAATGTGGCCATGTCTAATTCTCCT |
| | GTTGGCGAGTTTAAGCCCCTTGAAGCAGAAGAGTTCC |
| | GTAAACAGGCACACCGCATGGTGGATTTTATTGCGGA |
| | TTATTACAAGAACGTAGAAACATACCCGGTCCTTTCC |
| | GAGGTTGAACCCGGCTATCTGCGCAAACGTATTCCCG |
| | AAACCGCACCATACCTGCCGGAGCCACTTGATGATAT |
| | TATGAAGGATATTCAAAAGGACATTATCCCCGGAAT |
| | GACGAACTGGATGTCCCCGAACTTTTACGCCTTCTTC |
| | CCGGCCACAGTTAGCTCAGCAGCTTTCTTGGGGGAAA |
| | TGCTTTCAACGGCCCTTAACAGCGTAGGATTTACCTG |
| | GGTCAGTTCCCCGGCAGCGACTGAATTAGAGATGATC |
| | GTTATGGATTGGCTTGCGCAAATTTTGAAACTTCCAA |
| | AAAGCTTTATGTTCTCCGGAACCGGGGGTGGTGTCAT |
| | CCAAAACACTACGTCAGAGTCGATCTTGTGCACTATT |
| | ATCGCGGCCCGTGAACGCGCCTTGGAAAAATTGGGC |
| | CCTGATTCAATTGGTAAGCTTGTCTGCTATGGGTCCG |
| | ATCAAACGCACACAATGTTTCCGAAAACCTGTAAGTT |
| | AGCAGGAATTTATCCGAATAATATCCGCCTTATCCCT |
| | ACCACGGTAGAAACCGACTTTGGCATCTCACCGCAG |
| | GTACTTCGCAAGATGGTCGAAGACGACGTCGCTGCG |
| | GGGTACGTTCCCTTATTTTTGTGTGCCACCTTGGGAA |
| | CGACATCAACTACGGCAACAGATCCTGTAGATTCGCT |
| | GTCCGAAATCGCAAACGAGTTTGGTATCTGGATTCAT |
| | GTCGACGCCGCATATGCTGGATCGGCTTGCATCTGCC |
| | CAGAATTTCGTCACTACCTTGATGGCATCGAACGTGT |
| | GGATTCCTTATCGCTGTCTCCCCACAAATGGCTTTTA |
| | CCACGTAATTTTTCGCTTGTATGCTTTCGCTTGAAACC |
| | GGATGTATCTAGTTTACATGTCGAGGAGGTCAACAAG |
| | AAGTTGTTGGATATGCTTAACTCCACCGGTCGCGTAT |
| | ATATGACGCATACAATTGTTGGCGGAATCTATATGTT |
| | ACGTTTGGCTGTAGGTAGCAGCTTGACAGAGGAACA |
| | TCACGTGCGCCGCGTTTGGGACTTGATCCAGAAGCTT |
| | ACGGACGACCTGCTTAAAGAGGCGTGA |
| Tdc (tdc from | ATGGGTTCTATTGACTCGACGAATGTGGCCATGTCTA |
| C. roseus) | ATTCTCCTGTTGGCGAGTTTAAGCCCCTTGAAGCAGA |
| SEQ ID NO: 260 | AGAGTTCCGTAAACAGGCACACCGCATGGTGGATTTT |
| | ATTGCGGATTATTACAAGAACGTAGAAACATACCCG |
| | GTCCTTTCCGAGGTTGAACCCGGCTATCTGCGCAAAC |
| | GTATTCCCGAAACCGCACCATACCTGCCGGAGCCACT |
| | TGATGATATTATGAAGGATATTCAAAAGGACATTATC |
| | CCCGGAATGACGAACTGGATGTCCCCGAACTTTTACG |
| | CCTTCTTCCCGGCCACAGTTAGCTCAGCAGCTTTCTTG |
| | GGGGAAATGCTTTCAACGGCCCTTAACAGCGTAGGA |
| | TTTACCTGGGTCAGTTCCCCGGCAGCGACTGAATTAG |
| | AGATGATCGTTATGGATTGGCTTGCGCAAATTTTGAA |
| | ACTTCCAAAAAGCTTTATGTTCTCCGGAACCGGGGGT |
| | GGTGTCATCCAAAACACTACGTCAGAGTCGATCTTGT |
| | GCACTATTATCGCGGCCCGTGAACGCGCCTTGGAAAA |
| | ATTGGGCCCTGATTCAATTGGTAAGCTTGTCTGCTAT |
| | GGGTCCGATCAAACGCACACAATGTTTCCGAAAACCT |
| | GTAAGTTAGCAGGAATTTATCCGAATAATATCCGCCT |
| | TATCCCTACCACGGTAGAAACCGACTTTGGCATCTCA |
| | CCGCAGGTACTTCGCAAGATGGTCGAAGACGACGTC |
| | GCTGCGGGGTACGTTCCCTTATTTTTGTGTGCCACCTT |
| | GGGAACGACATCAACTACGGCAACAGATCCTGTAGA |
| | TTCGCTGTCCGAAATCGCAAACGAGTTTGGTATCTGG |
| | ATTCATGTCGACGCCGCATATGCTGGATCGGCTTGCA |
| | TCTGCCCAGAATTTCGTCACTACCTTGATGGCATCGA |
| | ACGTGTGGATTCCTTATCGCTGTCTCCCCACAAATGG |
| | CTTTTAGCATATCTGGATTGCACGTGCTTGTGGGTAA |
| | AACAACCTCACCTGCTGCTTCGCGCTTTAACGACTAA |
| | TCCCGAATACTTGAAGAATAAACAGAGTGATTTAGAT |
| | AAGGTCGTGGATTTTAAGAACTGGCAGATCGCAACA |
| | GGACGTAAGTTCCGCTCTTTAAAACTTTGGTTAATTC |
| | TGCGTTCCTACGGGGTAGTTAACCTGCAAAGTCATAT |
| | CCGTAGTGATGTAGCGATGGGGAAGATGTTTGAGGA |
| | ATGGGTCCGTTCCGATAGCCGCTTTGAAATCGTCGTG |
| | CCACGTAATTTTTCGCTTGTATGCTTTCGCTTGAAACC |
| | GGATGTATCTAGTTTACATGTCGAGGAGGTCAACAAG |
| | AAGTTGTTGGATATGCTTAACTCCACCGGTCGCGTAT |
| | ATATGACGCATACAATTGTTGGCGGAATCTATATGTT |
| | ACGTTTGGCTGTAGGTAGCAGCTTGACAGAGGAACA |
| | TCACGTGCGCCGCGTTTGGGACTTGATCCAGAAGCTT |
| | ACGGACGACCTGCTTAAAGAGGCGTGA |
| fbrAroG-Tdc (tdc | ctctagaaataattttgtttaactttaagaaggagatatacatatgaattatcagaacgacga |
| from Clostridium | tttacgcatcaaagaaatcaaagagttacttcctcctgtcgcattgctggaaaaattccccg |
| sporogenes); RBS | ctactgaaaatgccgcgaatacggtcgcccatgcccgaaaagcgatccataagatcctg |
| and leader region | aaaggtaatgatgatcgcctgttggtggtgattggcccatgctcaattcatgatcctgtcgc |
| underlined | ggctaaagagtatgccactcgcttgctgacgctgcgtgaagagctgcaagatgagctgg |
| SEQ ID NO: 261 | aaatcgtgatgcgcgtctattttgaaaagccgcgtactacggtgggctggaaagggctg |
| | attaacgatccgcatatggataacagcttccagatcaacgacggtctgcgtattgcccgc |
| | aaattgctgctcgatattaacgacagcggtctgccagcggcgggtgaattcctggatatg |
| | atcaccctacaatatctcgctgacctgatgagctggggcgcaattggcgcacgtaccac |
| | cgaatcgcaggtgcaccgcgaactggcgtctggtctttcttgtccggtaggtttcaaaaat |
| | ggcactgatggtacgattaaagtggctatcgatgccattaatgccgccggtgcgccgca |
| | ctgcttcctgtccgtaacgaaatgggggcattcggcgattgtgaataccagcggtaacg |
| | gcgattgccatatcattctgcgcggcggtaaagagcctaactacagcgcgaagcacgtt |
| | gctgaagtgaaagaagggctgaacaaagcaggcctgccagcgcaggtgatgatcgat |
| | ttcagccatgctaactcgtcaaaacaattcaaaaagcagatggatgtttgtactgacgtttg |
| | ccagcagattgccggtggcgaaaaggccattattggcgtgatggtggaaagccatctg |
| | gtggaaggcaatcagagcctcgagagcggggaaccgctggcctacggtaagagcatc |
| | accgatgcctgcattggctgggatgataccgatgctctgttacgtcaactggcgagtgca |
| | gtaaaagcgcgtcgcgggtaaTACTtaagaaggagatatacatATGAAATT |
| | TTGGCGCAAGTATACGCAACAGGAGATGGATGAGAA |
| | AATCACAGAATCGCTTGAGAAGACATTAAATTACGA |
| | TAACACGAAAACCATCGGCATCCCAGGTACTAAGCT |
| | GGATGATACTGTATTTTATGACGATCACTCCTTCGTT |
| | AAGCACTCTCCCTATTTACGTACGTTCATCCAAAACC |
| | CTAATCACATTGGTTGTCACACGTACGATAAAGCAGA |
| | CATCTTGTTTGGCGGCACGTTTGACATCGAACGCGAA |
| | CTGATTCAGCTTTTGGCCATCGATGTCTTAAACGGAA |
| | ATGATGAGGAATTCGATGGATATGTGACACAGGGGG |
| | GAACCGAGGCGAATATTCAGGCAATGTGGGTTTATC |
| | GTAACTATTTCAAAAAAGAACGTAAAGCAAAACATG |
| | AGGAAATCGCAATCATCACGAGCGCGGATACCCATT |
| | ACAGTGCATATAAGGGGAGCGACTTGCTGAACATTG |
| | ATATTATCAAGGTCCCAGTAGACTTCTATTCGCGTAA |
| | GATCCAGGAGAACACGTTAGACTCGATTGTCAAGGA |
| | GGCGAAGGAAATTGGAAAGAAGTACTTCATTGTCAT |
| | CTCAAACATGGGTACGACTATGTTTGGCAGTGTAGAC |
| | GACCCTGATCTTTATGCTAACATTTTTGATAAGTATA |
| | ACTTAGAATACAAAATCCACGTCGATGGAGCTTTTGG |
| | GGGTTTCATTTATCCTATCGATAATAAGGAGTGCAAA |
| | ACAGATTTCTCGAACAAGAACGTCTCATCCATCACGC |
| | TTGACGGTCACAAAATGCTTCAAGCCCCCTATGGGAC |
| | TGGTATCTTCGTGTCACGTAAGAACTTGATCCATAAC |
| | ACCCTGACAAAGGAAGCAACGTATATTGAAAACCTG |
| | GACGTTACCCTGAGTGGGTCCCGCTCCGGATCCAACG |
| | CCGTTGCGATCTGGATGGTTTTAGCCTCTTATGGCCC |
| | CTACGGGTGGATGGAGAAGATTAACAAGTTGCGCAA |
| | TCGCACTAAGTGGCTTTGCAAGCAGCTTAACGACATG |
| | CGCATCAAATACTATAAGGAGGATAGCATGAATATC |
| | GTCACGATTGAAGAGCAATACGTAAATAAAGAGATT |
| | GCAGAGAAATACTTCCTTGTGCCTGAAGTACACAATC |
| | CTACCAACAATTGGTACAAGATTGTAGTCATGGAACA |
| | TGTTGAACTTGACATCTTGAACTCCCTTGTTTATGATT |
| | TACGTAAATTCAACAAGGAGCACCTGAAGGCAATGT |
| | GA |
| Tdc (tdc from | ATGAAATTTTGGCGCAAGTATACGCAACAGGAGATG |
| Clostridium | GATGAGAAAATCACAGAATCGCTTGAGAAGACATTA |
| sporogenes) | AATTACGATAACACGAAAACCATCGGCATCCCAGGT |
| SEQ ID NO: 262 | ACTAAGCTGGATGATACTGTATTTTATGACGATCACT |
| | CCTTCGTTAAGCACTCTCCCTATTTACGTACGTTCATC |
| | CAAAACCCTAATCACATTGGTTGTCACACGTACGATA |
| | AAGCAGACATCTTGTTTGGCGGCACGTTTGACATCGA |
| | ACGCGAACTGATTCAGCTTTTGGCCATCGATGTCTTA |
| | AACGGAAATGATGAGGAATTCGATGGATATGTGACA |
| | CAGGGGGGAACCGAGGCGAATATTCAGGCAATGTGG |
| | GTTTATCGTAACTATTTCAAAAAAGAACGTAAAGCAA |
| | AACATGAGGAAATCGCAATCATCACGAGCGCGGATA |
| | CCCATTACAGTGCATATAAGGGGAGCGACTTGCTGA |
| | ACATTGATATTATCAAGGTCCCAGTAGACTTCTATTC |
| | GCGTAAGATCCAGGAGAACACGTTAGACTCGATTGT |
| | CAAGGAGGCGAAGGAAATTGGAAAGAAGTACTTCAT |
| | TGTCATCTCAAACATGGGTACGACTATGTTTGGCAGT |
| | GTAGACGACCCTGATCTTTATGCTAACATTTTTGATA |
| | AGTATAACTTAGAATACAAAATCCACGTCGATGGAG |
| | CTTTTGGGGGTTTCATTTATCCTATCGATAATAAGGA |
| | GTGCAAAACAGATTTCTCGAACAAGAACGTCTCATCC |
| | ATCACGCTTGACGGTCACAAAATGCTTCAAGCCCCCT |
| | ATGGGACTGGTATCTTCGTGTCACGTAAGAACTTGAT |
| | CCATAACACCCTGACAAAGGAAGCAACGTATATTGA |
| | AAACCTGGACGTTACCCTGAGTGGGTCCCGCTCCGGA |
| | TCCAACGCCGTTGCGATCTGGATGGTTTTAGCCTCTT |
| | ATGGCCCCTACGGGTGGATGGAGAAGATTAACAAGT |
| | TGCGCAATCGCACTAAGTGGCTTTGCAAGCAGCTTAA |
| | CGACATGCGCATCAAATACTATAAGGAGGATAGCAT |
| | GAATATCGTCACGATTGAAGAGCAATACGTAAATAA |
| | AGAGATTGCAGAGAAATACTTCCTTGTGCCTGAAGTA |
| | CACAATCCTACCAACAATTGGTACAAGATTGTAGTCA |
| | TGGAACATGTTGAACTTGACATCTTGAACTCCCTTGT |
| | TTATGATTTACGTAAATTCAACAAGGAGCACCTGAAG |
| | GCAATGTGA |
| fbrArG-trpDH- | Ctctagaaataattttgtttaactttaagaaggagatatacat |
| ipdC-iad1 (RBS | atgaattatcagaacgacgatttacgcatcaaagaaatcaaagagttacttcctcctgtcg |
| and leader region | cattgctggaaaaattccccgctactgaaaatgccgcgaatacggtcgcccatgcccga |
| underlined) | aaagcgatccataagatcctgaaaggtaatgatgatcgcctgttggtggtgattggccca |
| SEQ ID NO: 263 | tgctcaattcatgatcctgtcgcggctaaagagtatgccactcgcttgctgacgctgcgtg |
| | aagagctgcaagatgagctggaaatcgtgatgcgcgtctattttgaaaagccgcgtacta |
| | cggtgggctggaaagggctgattaacgatccgcatatggataacagcttccagatcaac |
| | gacggtctgcgtattgcccgcaaattgctgctcgatattaacgacagcggtctgccagcg |
| | gcgggtgaattcctggatatgatcaccctacaatatctcgctgacctgatgagctggggc |
| | gcaattggcgcacgtaccaccgaatcgcaggtgcaccgcgaactggcgtctggtctttc |
| | ttgtccggtaggtttcaaaaatggcactgatggtacgattaaagtggctatcgatgccatta |
| | atgccgccggtgcgccgcactgcttcctgtccgtaacgaaatgggggcattcggcgatt |
| | gtgaataccagcggtaacggcgattgccatatcattctgcgcggcggtaaagagcctaa |
| | ctacagcgcgaagcacgttgctgaagtgaaagaagggctgaacaaagcaggcctgcc |
| | agcgcaggtgatgatcgatttcagccatgctaactcgtcaaaacaattcaaaaagcagat |
| | ggatgtttgtactgacgtttgccagcagattgccggtggcgaaaaggccattattggcgt |
| | gatggtggaaagccatctggtggaaggcaatcagagcctcgagagcggggaaccgct |
| | ggcctacggtaagagcatcaccgatgcctgcattggctgggatgataccgatgctctgtt |
| | acgtcaactggcgagtgcagtaaaagcgcgtcgcgggtaaTACTtaagaaggaga |
| | tatacatATGCTGTTATTCGAGACTGTGCGTGAAATGGGT |
| | CATGAGCAAGTCCTTTTCTGTCATAGCAAGAATCCCG |
| | AGATCAAGGCAATTATCGCAATCCACGATACCACCTT |
| | AGGACCGGCTATGGGCGCAACTCGTATCTTACCTTAT |
| | ATTAATGAGGAGGCTGCCCTGAAAGATGCATTACGTC |
| | TGTCCCGCGGAATGACTTACAAAGCAGCCTGCGCCA |
| | ATATTCCCGCCGGGGGCGGCAAAGCCGTCATCATCGC |
| | TAACCCCGAAAACAAGACCGATGACCTGTTACGCGC |
| | ATACGGCCGTTTCGTGGACAGCTTGAACGGCCGTTTC |
| | ATCACCGGGCAGGACGTTAACATTACGCCCGACGAC |
| | GTTCGCACTATTTCGCAGGAGACTAAGTACGTGGTAG |
| | GCGTCTCAGAAAAGTCGGGAGGGCCGGCACCTATCA |
| | CCTCTCTGGGAGTATTTTTAGGCATCAAAGCCGCTGT |
| | AGAGTCGCGTTGGCAGTCTAAACGCCTGGATGGCAT |
| | GAAAGTGGCGGTGCAAGGACTTGGGAACGTAGGAAA |
| | AAATCTTTGTCGCCATCTGCATGAACACGATGTACAA |
| | CTTTTTGTGTCTGATGTCGATCCAATCAAGGCCGAGG |
| | AAGTAAAACGCTTATTCGGGGCGACTGTTGTCGAACC |
| | GACTGAAATCTATTCTTTAGATGTTGATATTTTTGCAC |
| | CGTGTGCACTTGGGGGTATTTTGAATAGCCATACCAT |
| | CCCGTTCTTACAAGCCTCAATCATCGCAGGAGCAGCG |
| | AATAACCAGCTGGAGAACGAGCAACTTCATTCGCAG |
| | ATGCTTGCGAAAAAGGGTATTCTTTACTCACCAGACT |
| | ACGTTATCAATGCAGGAGGACTTATCAATGTTTATAA |
| | CGAAATGATCGGATATGACGAGGAAAAAGCATTCAA |
| | ACAAGTTCATAACATCTACGATACGTTATTAGCGATT |
| | TTCGAAATTGCAAAAGAACAAGGTGTAACCACCAAC |
| | GACGCGGCCCGTCGTTTAGCAGAGGATCGTATCAAC |
| | AACTCCAAACGCTCAAAGAGTAAAGCGATTGCGGCG |
| | TGAAATGtaagaaggagatatacatATGCGTACACCCTACTGTG |
| | TCGCCGATTATCTTTTAGATCGTCTGACGGACTGCGG |
| | GGCCGATCACCTGTTTGGCGTACCGGGCGATTACAAC |
| | TTGCAGTTTCTGGACCACGTCATTGACTCACCAGATA |
| | TCTGCTGGGTAGGGTGTGCGAACGAGCTTAACGCGA |
| | GCTACGCTGCTGACGGATATGCGCGTTGTAAAGGCTT |
| | TGCTGCACTTCTTACTACCTTCGGGGTCGGTGAGTTA |
| | TCGGCGATGAACGGTATCGCAGGCTCGTACGCTGAG |
| | CACGTCCCGGTATTACACATTGTGGGAGCTCCGGGTA |
| | CCGCAGCTCAACAGCGCGGAGAACTGTTACACCACA |
| | CGCTGGGCGACGGAGAATTCCGCCACTTTTACCATAT |
| | GTCCGAGCCAATTACTGTAGCCCAGGCTGTACTTACA |
| | GAGCAAAATGCCTGTTACGAGATCGACCGTGTTTTGA |
| | CCACGATGCTTCGCGAGCGCCGTCCCGGGTATTTGAT |
| | GCTGCCAGCCGATGTTGCCAAAAAAGCTGCGACGCC |
| | CCCAGTGAATGCCCTGACGCATAAACAAGCTCATGCC |
| | GATTCCGCCTGTTTAAAGGCTTTTCGCGATGCAGCTG |
| | AAAATAAATTAGCCATGTCGAAACGCACCGCCTTGTT |
| | GGCGGACTTTCTGGTCCTGCGCCATGGCCTTAAACAC |
| | GCCCTTCAGAAATGGGTCAAAGAAGTCCCGATGGCC |
| | CACGCTACGATGCTTATGGGTAAGGGGATTTTTGATG |
| | AACGTCAAGCGGGATTTTATGGAACTTATTCCGGTTC |
| | GGCGAGTACGGGGGCGGTAAAGGAAGCGATTGAGGG |
| | AGCCGACACAGTTCTTTGCGTGGGGACACGTTTCACC |
| | GATACACTGACCGCTGGATTCACACACCAACTTACTC |
| | CGGCACAAACGATTGAGGTGCAACCCCATGCGGCTC |
| | GCGTGGGGGATGTATGGTTTACGGGCATTCCAATGAA |
| | TCAAGCCATTGAGACTCTTGTCGAGCTGTGCAAACAG |
| | CACGTCCACGCAGGACTGATGAGTTCGAGCTCTGGG |
| | GCGATTCCTTTTCCACAACCAGATGGTAGTTTAACTC |
| | AAGAAAACTTCTGGCGCACATTGCAAACCTTTATCCG |
| | CCCAGGTGATATCATCTTAGCAGACCAGGGTACTTCA |
| | GCCTTTGGAGCAATTGACCTGCGCTTACCAGCAGACG |
| | TGAACTTTATTGTGCAGCCGCTGTGGGGGTCTATTGG |
| | TTATACTTTAGCTGCGGCCTTCGGAGCGCAGACAGCG |
| | TGTCCAAACCGTCGTGTGATCGTATTGACAGGAGATG |
| | GAGCAGCGCAGTTGACCATTCAGGAGTTAGGCTCGA |
| | TGTTACGCGATAAGCAGCACCCCATTATCCTGGTCCT |
| | GAACAATGAGGGGTATACAGTTGAACGCGCCATTCA |
| | TGGTGCGGAACAACGCTACAATGACATCGCTTTATGG |
| | AATTGGACGCACATCCCCCAAGCCTTATCGTTAGATC |
| | CCCAATCGGAATGTTGGCGTGTGTCTGAAGCAGAGC |
| | AACTGGCTGATGTTCTGGAAAAAGTTGCTCATCATGA |
| | ACGCCTGTCGTTGATCGAGGTAATGTTGCCCAAGGCC |
| | GATATCCCTCCGTTACTGGGAGCCTTGACCAAGGCTT |
| | TAGAAGCCTGCAACAACGCTTAAAGGTtaagaaggagatata |
| | catATGCCCACCTTGAACTTGGACTTACCCAACGGTAT |
| | TAAGAGCACGATTCAGGCAGACCTTTTCATCAATAAT |
| | AAGTTTGTGCCGGCGCTTGATGGGAAAACGTTCGCAA |
| | CTATTAATCCGTCTACGGGGAAAGAGATCGGACAGG |
| | TGGCAGAGGCTTCGGCGAAGGATGTGGATCTTGCAG |
| | TTAAGGCCGCGCGTGAGGCGTTTGAAACTACTTGGGG |
| | GGAAAACACGCCAGGTGATGCTCGTGGCCGTTTACTG |
| | ATTAAGCTTGCTGAGTTGGTGGAAGCGAATATTGATG |
| | AGTTAGCGGCAATTGAATCACTGGACAATGGGAAAG |
| | CGTTCTCTATTGCTAAGTCATTCGACGTAGCTGCTGT |
| | GGCCGCAAACTTACGTTACTACGGCGGTTGGGCTGAT |
| | AAAAACCACGGTAAAGTCATGGAGGTAGACACAAAG |
| | CGCCTGAACTATACCCGCCACGAGCCGATCGGGGTTT |
| | GCGGACAAATCATTCCGTGGAATTTCCCGCTTTTGAT |
| | GTTTGCATGGAAGCTGGGTCCCGCTTTAGCCACAGGG |
| | AACACAATTGTGTTAAAGACTGCCGAGCAGACTCCCT |
| | TAAGTGCTATCAAGATGTGTGAATTAATCGTAGAAGC |
| | CGGCTTTCCGCCCGGAGTAGTTAATGTGATCTCGGGA |
| | TTCGGACCGGTGGCGGGGGCCGCGATCTCGCAACAC |
| | ATGGACATCGATAAGATTGCCTTTACAGGATCGACAT |
| | TGGTTGGCCGCAACATTATGAAGGCAGCTGCGTCGAC |
| | TAACTTAAAAAAGGTTACACTTGAGTTAGGAGGAAA |
| | ATCCCCGAATATCATTTTCAAAGATGCCGACCTTGAC |
| | CAAGCTGTTCGCTGGAGCGCCTTCGGTATCATGTTTA |
| | ACCACGGACAATGCTGCTGCGCTGGATCGCGCGTATA |
| | TGTGGAAGAATCCATCTATGACGCCTTCATGGAAAAA |
| | ATGACTGCGCATTGTAAGGCGCTTCAAGTTGGAGATC |
| | CTTTCAGCGCGAACACCTTCCAAGGACCACAAGTCTC |
| | GCAGTTACAATACGACCGTATCATGGAATACATCGA |
| | ATCAGGGAAAAAAGATGCAAATCTTGCTTTAGGCGG |
| | CGTTCGCAAAGGGAATGAGGGGTATTTCATTGAGCC |
| | AACTATTTTTACAGACGTGCCGCACGACGCGAAGATT |
| | GCCAAAGAGGAGATCTTCGGTCCAGTGGTTGTTGTGT |
| | CGAAATTTAAGGACGAAAAAGATCTGATCCGTATCG |
| | CAAATGATTCTATTTATGGTTTAGCTGCGGCAGTCTTT |
| | TCCCGCGACATCAGCCGCGCGATCGAGACAGCACAC |
| | AAACTGAAAGCAGGCACGGTCTGGGTCAACTGCTAT |
| | AATCAGCTTATTCCGCAGGTGCCATTCGGAGGGTATA |
| | AGGCTTCCGGTATCGGCCGTGAGTTGGGGGAATATGC |
| | CTTGTCTAATTACACAAATATCAAGGCCGTCCACGTT |
| | AACCTTTCTCAACCGGCGCCCATTTGA |
| trpDH | ATGCTGTTATTCGAGACTGTGCGTGAAATGGGTCATG |
| SEQ ID NO: 264 | AGCAAGTCCTTTTCTGTCATAGCAAGAATCCCGAGAT |
| | CAAGGCAATTATCGCAATCCACGATACCACCTTAGGA |
| | CCGGCTATGGGCGCAACTCGTATCTTACCTTATATTA |
| | ATGAGGAGGCTGCCCTGAAAGATGCATTACGTCTGTC |
| | CCGCGGAATGACTTACAAAGCAGCCTGCGCCAATATT |
| | CCCGCCGGGGGCGGCAAAGCCGTCATCATCGCTAAC |
| | CCCGAAAACAAGACCGATGACCTGTTACGCGCATAC |
| | GGCCGTTTCGTGGACAGCTTGAACGGCCGTTTCATCA |
| | CCGGGCAGGACGTTAACATTACGCCCGACGACGTTC |
| | GCACTATTTCGCAGGAGACTAAGTACGTGGTAGGCGT |
| | CTCAGAAAAGTCGGGAGGGCCGGCACCTATCACCTC |
| | TCTGGGAGTATTTTTAGGCATCAAAGCCGCTGTAGAG |
| | TCGCGTTGGCAGTCTAAACGCCTGGATGGCATGAAA |
| | GTGGCGGTGCAAGGACTTGGGAACGTAGGAAAAAAT |
| | CTTTGTCGCCATCTGCATGAACACGATGTACAACTTT |
| | TTGTGTCTGATGTCGATCCAATCAAGGCCGAGGAAGT |
| | AAAACGCTTATTCGGGGCGACTGTTGTCGAACCGACT |
| | GAAATCTATTCTTTAGATGTTGATATTTTTGCACCGTG |
| | TGCACTTGGGGGTATTTTGAATAGCCATACCATCCCG |
| | TTCTTACAAGCCTCAATCATCGCAGGAGCAGCGAATA |
| | ACCAGCTGGAGAACGAGCAACTTCATTCGCAGATGC |
| | TTGCGAAAAAGGGTATTCTTTACTCACCAGACTACGT |
| | TATCAATGCAGGAGGACTTATCAATGTTTATAACGAA |
| | ATGATCGGATATGACGAGGAAAAAGCATTCAAACAA |
| | GTTCATAACATCTACGATACGTTATTAGCGATTTTCG |
| | AAATTGCAAAAGAACAAGGTGTAACCACCAACGACG |
| | CGGCCCGTCGTTTAGCAGAGGATCGTATCAACAACTC |
| | CAAACGCTCAAAGAGTAAAGCGATTGCGGCGTGA |
| ipdC | ATGCGTACACCCTACTGTGTCGCCGATTATCTTTTAG |
| SEQ ID NO: 265 | ATCGTCTGACGGACTGCGGGGCCGATCACCTGTTTGG |
| | CGTACCGGGCGATTACAACTTGCAGTTTCTGGACCAC |
| | GTCATTGACTCACCAGATATCTGCTGGGTAGGGTGTG |
| | CGAACGAGCTTAACGCGAGCTACGCTGCTGACGGAT |
| | ATGCGCGTTGTAAAGGCTTTGCTGCACTTCTTACTAC |
| | CTTCGGGGTCGGTGAGTTATCGGCGATGAACGGTATC |
| | GCAGGCTCGTACGCTGAGCACGTCCCGGTATTACACA |
| | TTGTGGGAGCTCCGGGTACCGCAGCTCAACAGCGCG |
| | GAGAACTGTTACACCACACGCTGGGCGACGGAGAAT |
| | TCCGCCACTTTTACCATATGTCCGAGCCAATTACTGT |
| | AGCCCAGGCTGTACTTACAGAGCAAAATGCCTGTTAC |
| | GAGATCGACCGTGTTTTGACCACGATGCTTCGCGAGC |
| | GCCGTCCCGGGTATTTGATGCTGCCAGCCGATGTTGC |
| | CAAAAAAGCTGCGACGCCCCCAGTGAATGCCCTGAC |
| | GCATAAACAAGCTCATGCCGATTCCGCCTGTTTAAAG |
| | GCTTTTCGCGATGCAGCTGAAAATAAATTAGCCATGT |
| | CGAAACGCACCGCCTTGTTGGCGGACTTTCTGGTCCT |
| | GCGCCATGGCCTTAAACACGCCCTTCAGAAATGGGTC |
| | AAAGAAGTCCCGATGGCCCACGCTACGATGCTTATG |
| | GGTAAGGGGATTTTTGATGAACGTCAAGCGGGATTTT |
| | ATGGAACTTATTCCGGTTCGGCGAGTACGGGGGCGGT |
| | AAAGGAAGCGATTGAGGGAGCCGACACAGTTCTTTG |
| | CGTGGGGACACGTTTCACCGATACACTGACCGCTGGA |
| | TTCACACACCAACTTACTCCGGCACAAACGATTGAGG |
| | TGCAACCCCATGCGGCTCGCGTGGGGGATGTATGGTT |
| | TACGGGCATTCCAATGAATCAAGCCATTGAGACTCTT |
| | GTCGAGCTGTGCAAACAGCACGTCCACGCAGGACTG |
| | ATGAGTTCGAGCTCTGGGGCGATTCCTTTTCCACAAC |
| | CAGATGGTAGTTTAACTCAAGAAAACTTCTGGCGCAC |
| | ATTGCAAACCTTTATCCGCCCAGGTGATATCATCTTA |
| | GCAGACCAGGGTACTTCAGCCTTTGGAGCAATTGACC |
| | TGCGCTTACCAGCAGACGTGAACTTTATTGTGCAGCC |
| | GCTGTGGGGGTCTATTGGTTATACTTTAGCTGCGGCC |
| | TTCGGAGCGCAGACAGCGTGTCCAAACCGTCGTGTG |
| | ATCGTATTGACAGGAGATGGAGCAGCGCAGTTGACC |
| | ATTCAGGAGTTAGGCTCGATGTTACGCGATAAGCAGC |
| | ACCCCATTATCCTGGTCCTGAACAATGAGGGGTATAC |
| | AGTTGAACGCGCCATTCATGGTGCGGAACAACGCTA |
| | CAATGACATCGCTTTATGGAATTGGACGCACATCCCC |
| | CAAGCCTTATCGTTAGATCCCCAATCGGAATGTTGGC |
| | GTGTGTCTGAAGCAGAGCAACTGGCTGATGTTCTGGA |
| | AAAAGTTGCTCATCATGAACGCCTGTCGTTGATCGAG |
| | GTAATGTTGCCCAAGGCCGATATCCCTCCGTTACTGG |
| | GAGCCTTGACCAAGGCTTTAGAAGCCTGCAACAACG |
| | CTTAA |
| Iad1 | ATGCCCACCTTGAACTTGGACTTACCCAACGGTATTA |
| SEQ ID NO: 266 | AGAGCACGATTCAGGCAGACCTTTTCATCAATAATAA |
| | GTTTGTGCCGGCGCTTGATGGGAAAACGTTCGCAACT |
| | ATTAATCCGTCTACGGGGAAAGAGATCGGACAGGTG |
| | GCAGAGGCTTCGGCGAAGGATGTGGATCTTGCAGTT |
| | AAGGCCGCGCGTGAGGCGTTTGAAACTACTTGGGGG |
| | GAAAACACGCCAGGTGATGCTCGTGGCCGTTTACTGA |
| | TTAAGCTTGCTGAGTTGGTGGAAGCGAATATTGATGA |
| | GTTAGCGGCAATTGAATCACTGGACAATGGGAAAGC |
| | GTTCTCTATTGCTAAGTCATTCGACGTAGCTGCTGTG |
| | GCCGCAAACTTACGTTACTACGGCGGTTGGGCTGATA |
| | AAAACCACGGTAAAGTCATGGAGGTAGACACAAAGC |
| | GCCTGAACTATACCCGCCACGAGCCGATCGGGGTTTG |
| | CGGACAAATCATTCCGTGGAATTTCCCGCTTTTGATG |
| | TTTGCATGGAAGCTGGGTCCCGCTTTAGCCACAGGGA |
| | ACACAATTGTGTTAAAGACTGCCGAGCAGACTCCCTT |
| | AAGTGCTATCAAGATGTGTGAATTAATCGTAGAAGCC |
| | GGCTTTCCGCCCGGAGTAGTTAATGTGATCTCGGGAT |
| | TCGGACCGGTGGCGGGGGCCGCGATCTCGCAACACA |
| | TGGACATCGATAAGATTGCCTTTACAGGATCGACATT |
| | GGTTGGCCGCAACATTATGAAGGCAGCTGCGTCGACT |
| | AACTTAAAAAAGGTTACACTTGAGTTAGGAGGAAAA |
| | TCCCCGAATATCATTTTCAAAGATGCCGACCTTGACC |
| | AAGCTGTTCGCTGGAGCGCCTTCGGTATCATGTTTAA |
| | CCACGGACAATGCTGCTGCGCTGGATCGCGCGTATAT |
| | GTGGAAGAATCCATCTATGACGCCTTCATGGAAAAA |
| | ATGACTGCGCATTGTAAGGCGCTTCAAGTTGGAGATC |
| | CTTTCAGCGCGAACACCTTCCAAGGACCACAAGTCTC |
| | GCAGTTACAATACGACCGTATCATGGAATACATCGA |
| | ATCAGGGAAAAAAGATGCAAATCTTGCTTTAGGCGG |
| | CGTTCGCAAAGGGAATGAGGGGTATTTCATTGAGCC |
| | AACTATTTTTACAGACGTGCCGCACGACGCGAAGATT |
| | GCCAAAGAGGAGATCTTCGGTCCAGTGGTTGTTGTGT |
| | CGAAATTTAAGGACGAAAAAGATCTGATCCGTATCG |
| | CAAATGATTCTATTTATGGTTTAGCTGCGGCAGTCTTT |
| | TCCCGCGACATCAGCCGCGCGATCGAGACAGCACAC |
| | AAACTGAAAGCAGGCACGGTCTGGGTCAACTGCTAT |
| | AATCAGCTTATTCCGCAGGTGCCATTCGGAGGGTATA |
| | AGGCTTCCGGTATCGGCCGTGAGTTGGGGGAATATGC |
| | CTTGTCTAATTACACAAATATCAAGGCCGTCCACGTT |
| | AACCTTTCTCAACCGGCGCCCATTTGA |
| TrpEDCBA (RBS | Ctctagaaataattttgtttaactttaagaaggagatatacat |
| and leader region | atgcaaacacaaaaaccgactctcgaactgctaacctgcgaaggcgcttatcgcgacaa |
| underlined) | cccgactgcgctattcaccagagtgtggggatcgtccggcaacgctgctgctggaatc |
| SEQ ID NO: 267 | cgcagatatcgacagcaaagatgatttaaaaagcctgctgctggtagacagtgcgctgc |
| | gcattacagcattaagtgacactgtcacaatccaggcgctaccggcaatggagaagcc |
| | ctgagacactactggataacgccagcctgcgggtgtggaaaatgaacaatcaccaaac |
| | tgccgcgtactgcgcacccgcctgtcagtccactgctggatgaagacgcccgcttatgc |
| | tcccatcggtattgacgctaccgcttattacagaatctgagaatgtaccgaaggaagaa |
| | cgagaagcaatgacttcggcggcctgactcttatgaccagtggcgggatttgaaaattt |
| | accgcaactgtcagcggaaaatagctgccctgatactgatttatctcgctgaaacgctga |
| | tggtgattgaccatcagaaaaaaagcactcgtattcaggccagcctgatgctccgaatg |
| | aagaagaaaaacaacgtctcactgctcgcctgaacgaactacgtcagcaactgaccga |
| | agccgcgccgccgctgccggtggtaccgtgccgcatatgcgagtgaatgtaaccaga |
| | gcgatgaagagacggtggtgtagtgcgatgagcaaaaagcgattcgcgccggagaa |
| | attaccaggtggtgccatctcgccgtactctctgccctgcccgtcaccgctggcagccta |
| | ttacgtgctgaaaaagagtaatcccagcccgtacatgatatatgcaggataatgatacac |
| | cctgtaggcgcgtcgccggaaagacgctcaagtatgacgccaccagccgccagattg |
| | agatttacccgattgccggaacacgtccacgcggtcgtcgtgccgatggacgctggac |
| | agagacctcgacagccgcatcgaactggagatgcgtaccgatcataaagagctactga |
| | acatctgatgctggtggatctcgcccgtaatgacctggcacgcatttgcacacccggca |
| | gccgctacgtcgccgatctcaccaaagagaccgttactcttacgtgatgcacctagtctc |
| | ccgcgagaggtgagctgcgccacgatctcgacgccctgcacgcttaccgcgcctgtat |
| | gaatatggggacgttaagcggtgcaccgaaagtacgcgctatgcagttaattgccgaag |
| | cagaaggtcgtcgacgcggcagctacggcggcgcggtaggttatataccgcgcatgg |
| | cgatctcgacacctgcattgtgatccgctcggcgctggtggaaaacggtatcgccaccg |
| | tgcaagccggtgctggcgtagtccagattctgaccgcagtcggaagccgacgaaactc |
| | gtaataaagcccgcgctgtactgcgcgctattgccaccgcgcatcatgcacaggagac |
| | gactaatggctgacattctgctgctcgataatatcgactcattacgtacaacctggcagat |
| | cagagcgcagcaatggtcataacgtggtgatttaccgcaaccatattccggcgcagacc |
| | ttaattgaacgcctggcgacgatgagcaatccggtgctgatgctactcctggccccggt |
| | gtgccgagcgaagccggagtatgccggaactcctcacccgcttgcgtggcaagctgc |
| | caattattggcatttgcctcggacatcaggcgattgtcgaagcttacgggggctatgtcgg |
| | tcaggcgggcgaaattcacacggtaaagcgtcgagcattgaacatgacggtcaggcg |
| | atgatgccggattaacaaacccgctgccagtggcgcgttatcactcgctggaggcagt |
| | aacattccggccggataaccatcaacgcccatataatggcatggtgatggcggtgcgtc |
| | acgatgcagatcgcgtagtggattccagaccatccggaatccattcttactacccaggg |
| | cgctcgcctgctggaacaaacgctggcctgggcgcagcagaaactagagccaaccaa |
| | cacgctgcaaccgattctggaaaaactgtatcaggcacagacgcttagccaacaagaa |
| | agccaccagctgattcagcggtggtacgtggcgagctgaagccggaacaactggcgg |
| | cggcgctggtgagcatgaaaattcgcggtgaacacccgaacgagatcgccggggcag |
| | caaccgcgctactggaaaacgccgcgccattcccgcgcccggattatctgatgccgat |
| | atcgtcggtactggcggtgacggcagcaacagcatcaatatactaccgccagtgcgat |
| | gtcgccgcggcctgcgggctgaaagtggcgaaacacggcaaccgtagcgtctccagt |
| | aaatccggctcgtcggatctgctggcggcgacggtattaatcagatatgaacgccgata |
| | aatcgcgccaggcgctggatgagttaggcgtctgatcctcatgcgccgaagtatcaca |
| | ccggattccgccatgcgatgccggttcgccagcaactgaaaacccgcactctgttcaac |
| | gtgctgggaccattgattaacccggcgcatccgccgctggcgctaattggtgtttatagtc |
| | cggaactggtgctgccgattgccgaaaccttgcgcgtgctggggtatcaacgcgcggc |
| | agtggtgcacagcggcgggatggatgaagtttcattacacgcgccgacaatcgttgccg |
| | aactacatgacggcgaaattaagagctatcaattgaccgctgaagattttggcctgacac |
| | cctaccaccaggagcaattggcaggcggaacaccggaagaaaaccgtgacattttaac |
| | acgcttgttacaaggtaaaggcgacgccgcccatgaagcagccgtcgcggcgaatgtc |
| | gccatgttaatgcgcctgcatggccatgaagatctgcaagccaatgcgcaaaccgttctt |
| | gaggtactgcgcagtggttccgcttacgacagagtcaccgcactggcggcacgagggt |
| | aaatgatgcaaaccgttttagcgaaaatcgtcgcagacaaggcgatttgggtagaaacc |
| | cgcaaagagcagcaaccgctggccagttttcagaatgaggttcagccgagcacgcga |
| | catttttatgatgcacttcagggcgcacgcacggcgtttattctggagtgtaaaaaagcgt |
| | cgccgtcaaaaggcgtgatccgtgatgatttcgatccggcacgcattgccgccatttata |
| | aacattacgcttcggcaatttcagtgctgactgatgagaaatattttcaggggagctttgatt |
| | tcctccccatcgtcagccaaatcgccccgcagccgattttatgtaaagacttcattatcgat |
| | ccttaccagatctatctggcgcgctattaccaggccgatgcctgcttattaatgctttcagta |
| | ctggatgacgaacaatatcgccagcttgcagccgtcgcccacagtctggagatgggtgt |
| | gctgaccgaagtcagtaatgaagaggaactggagcgcgccattgcattgggggcaaa |
| | ggtcgttggcatcaacaaccgcgatctgcgcgatttgtcgattgatctcaaccgtacccg |
| | cgagcttgcgccgaaactggggcacaacgtgacggtaatcagcgaatccggcatcaat |
| | acttacgctcaggtgcgcgagttaagccacttcgctaacggctttctgattggttcggcgtt |
| | gatggcccatgacgatttgaacgccgccgtgcgtcgggtgttgctgggtgagaataaag |
| | tatgtggcctgacacgtgggcaagatgctaaagcagcttatgacgcgggcgcgatttac |
| | ggtgggttgatttttgttgcgacatcaccgcgttgcgtcaacgttgaacaggcgcaggaa |
| | gtgatggctgcagcaccgttgcagtatgttggcgtgttccgcaatcacgatattgccgatg |
| | tggcggacaaagctaaggtgttatcgctggcggcagtgcaactgcatggtaatgaagat |
| | cagctgtatatcgacaatctgcgtgaggctctgccagcacacgtcgccatctggaaggc |
| | tttaagtgtcggtgaaactcttcccgcgcgcgattttcagcacatcgataaatatgtattcg |
| | acaacggtcagggcgggagcggacaacgtttcgactggtcactattaaatggtcaatcg |
| | cttggcaacgttctgctggcggggggcttaggcgcagataactgcgtggaagcggcac |
| | aaaccggctgcgccgggcttgattttaattctgctgtagagtcgcaaccgggtatcaaag |
| | acgcacgtcttttggcctcggttttccagacgctgcgcgcatattaaggaaaggaacaat |
| | gacaacattacttaacccctattttggtgagtttggcggcatgtacgtgccacaaatcctga |
| | tgcctgctctgcgccagctggaagaagcttttgtcagcgcgcaaaaagatcctgaatttc |
| | aggctcagttcaacgacctgctgaaaaactatgccgggcgtccaaccgcgctgaccaa |
| | atgccagaacattacagccgggacgaacaccacgctgtatctgaagcgcgaagatttg |
| | ctgcacggcggcgcgcataaaactaaccaggtgctcggtcaggctttactggcgaagc |
| | ggatgggtaaaactgaaattattgccgaaaccggtgccggtcagcatggcgtggcgtc |
| | ggcccttgccagcgccctgctcggcctgaaatgccgaatttatatgggtgccaaagacg |
| | ttgaacgccagtcgcccaacgttttccggatgcgcttaatgggtgcggaagtgatcccg |
| | gtacatagcggttccgcgaccctgaaagatgcctgtaatgaggcgctacgcgactggtc |
| | cggcagttatgaaaccgcgcactatatgctgggtaccgcagctggcccgcatccttacc |
| | cgaccattgtgcgtgagtttcagcggatgattggcgaagaaacgaaagcgcagattctg |
| | gaaagagaaggtcgcctgccggatgccgttatcgcctgtgttggcggtggttcgaatgc |
| | catcggtatgtttgcagatttcatcaacgaaaccgacgtcggcctgattggtgtggagcct |
| | ggcggccacggtatcgaaactggcgagcacggcgcaccgttaaaacatggtcgcgtg |
| | ggcatctatttcggtatgaaagcgccgatgatgcaaaccgaagacgggcaaattgaaga |
| | gtcttactccatttctgccgggctggatttcccgtccgtcggcccgcaacatgcgtatctca |
| | acagcactggacgcgctgattacgtgtctattaccgacgatgaagccctggaagccttta |
| | aaacgctttgcctgcatgaagggatcatcccggcgctggaatcctcccacgccctggcc |
| | catgcgctgaaaatgatgcgcgaaaatccggaaaaagagcagctactggtggttaacct |
| | ttccggtcgcggcgataaagacatcttcaccgttcacgatattttgaaagcacgagggga |
| | aatctgatggaacgctacgaatctctgtttgcccagttgaaggagcgcaaagaaggcgc |
| | attcgttcctttcgtcaccctcggtgatccgggcattgagcagtcgttgaaaattatcgata |
| | cgctaattgaagccggtgctgacgcgctggagttaggcatccccttctccgacccactg |
| | gcggatggcccgacgattcaaaacgccacactgcgtgcttttgcggcgggagtaaccc |
| | cggcgcagtgctttgagatgctggcactcattcgccagaagcacccgaccattcccatc |
| | ggccttttgatgtatgccaacctggtgtttaacaaaggcattgatgagttttatgccgagtg |
| | cgagaaagtcggcgtcgattcggtgctggttgccgatgtgcccgtggaagagtccgcg |
| | cccttccgccaggccgcgttgcgtcataatgtcgcacctatctttatttgcccgccgaatg |
| | ccgacgatgatttgctgcgccagatagcctcttacggtcgtggttacacctatttgctgtcg |
| | cgagcgggcgtgaccggcgcagaaaaccgcgccgcgttacccctcaatcatctggttg |
| | cgaagctgaaagagtacaacgctgcgcctccattgcagggatttggtatttccgccccg |
| | gatcaggtaaaagccgcgattgatgcaggagctgcgggcgcgatttctggttcggccat |
| | cgttaaaatcatcgagcaacatattaatgagccagagaaaatgctggcggcactgaaag |
| | cttttgtacaaccgatgaaagcggcgacgcgcagtta |
| trpE | atgcaaacacaaaaaccgactctcgaactgctaacctgcgaaggcgcttatcgcgacaa |
| SEQ ID NO: 268 | cccgactgcgctttttcaccagttgtgtggggatcgtccggcaacgctgctgctggaatc |
| | cgcagatatcgacagcaaagatgatttaaaaagcctgctgctggtagacagtgcgctgc |
| | gcattacagcattaagtgacactgtcacaatccaggcgctttccggcaatggagaagcc |
| | ctgttgacactactggataacgccttgcctgcgggtgtggaaaatgaacaatcaccaaac |
| | tgccgcgtactgcgcttcccgcctgtcagtccactgctggatgaagacgcccgcttatgc |
| | tccctttcggtttttgacgctttccgcttattacagaatctgttgaatgtaccgaaggaagaa |
| | cgagaagcaatgttcttcggcggcctgttctcttatgaccttgtggcgggatttgaaaattt |
| | accgcaactgtcagcggaaaatagctgccctgatttctgatttatctcgctgaaacgctga |
| | tggtgattgaccatcagaaaaaaagcactcgtattcaggccagcctgtttgctccgaatg |
| | aagaagaaaaacaacgtctcactgctcgcctgaacgaactacgtcagcaactgaccga |
| | agccgcgccgccgctgccggtggtttccgtgccgcatatgcgttgtgaatgtaaccaga |
| | gcgatgaagagttcggtggtgtagtgcgtttgttgcaaaaagcgattcgcgccggagaa |
| | attttccaggtggtgccatctcgccgtttctctctgccctgcccgtcaccgctggcagccta |
| | ttacgtgctgaaaaagagtaatcccagcccgtacatgattttatgcaggataatgatttcac |
| | cctgtttggcgcgtcgccggaaagttcgctcaagtatgacgccaccagccgccagattg |
| | agatttacccgattgccggaacacgtccacgcggtcgtcgtgccgatggttcgctggac |
| | agagacctcgacagccgcatcgaactggagatgcgtaccgatcataaagagctttctga |
| | acatctgatgctggtggatctcgcccgtaatgacctggcacgcatttgcacacccggca |
| | gccgctacgtcgccgatctcaccaaagttgaccgttactcttacgtgatgcacctagtctc |
| | ccgcgttgttggtgagctgcgccacgatctcgacgccctgcacgcttaccgcgcctgtat |
| | gaatatggggacgttaagcggtgcaccgaaagtacgcgctatgcagttaattgccgaag |
| | cagaaggtcgtcgacgcggcagctacggcggcgcggtaggttattttaccgcgcatgg |
| | cgatctcgacacctgcattgtgatccgctcggcgctggtggaaaacggtatcgccaccg |
| | tgcaagccggtgctggcgtagtccttgattctgttccgcagtcggaagccgacgaaactc |
| | gtaataaagcccgcgctgtactgcgcgctattgccaccgcgcatcatgcacaggagac |
| | gttcta |
| trpD | atggctgacattctgctgctcgataatatcgactcttttacgtacaacctggcagatcagtt |
| SEQ ID NO: 269 | gcgcagcaatggtcataacgtggtgatttaccgcaaccatattccggcgcagaccttaat |
| | tgaacgcctggcgacgatgagcaatccggtgctgatgctttctcctggccccggtgtgc |
| | cgagcgaagccggttgtatgccggaactcctcacccgcttgcgtggcaagctgccaatt |
| | attggcatttgcctcggacatcaggcgattgtcgaagcttacgggggctatgtcggtcag |
| | gcgggcgaaattcttcacggtaaagcgtcgagcattgaacatgacggtcaggcgatgtt |
| | tgccggattaacaaacccgctgccagtggcgcgttatcactcgctggttggcagtaacat |
| | tccggccggtttaaccatcaacgcccattttaatggcatggtgatggcggtgcgtcacga |
| | tgcagatcgcgtttgtggattccagttccatccggaatccattcttactacccagggcgctc |
| | gcctgctggaacaaacgctggcctgggcgcagcagaaactagagccaaccaacacg |
| | ctgcaaccgattctggaaaaactgtatcaggcacagacgcttagccaacaagaaagcc |
| | accagctgttttcagcggtggtacgtggcgagctgaagccggaacaactggcggcggc |
| | gctggtgagcatgaaaattcgcggtgaacacccgaacgagatcgccggggcagcaac |
| | cgcgctactggaaaacgccgcgccattcccgcgcccggattatctgtttgccgatatcgt |
| | cggtactggcggtgacggcagcaacagcatcaatatttctaccgccagtgcgtttgtcgc |
| | cgcggcctgcgggctgaaagtggcgaaacacggcaaccgtagcgtctccagtaaatc |
| | cggctcgtcggatctgctggcggcgttcggtattaatcttgatatgaacgccgataaatcg |
| | cgccaggcgctggatgagttaggcgtctgtttcctctttgcgccgaagtatcacaccgga |
| | ttccgccatgcgatgccggttcgccagcaactgaaaacccgcactctgttcaacgtgctg |
| | ggaccattgattaacccggcgcatccgccgctggcgctaattggtgtttatagtccggaa |
| | ctggtgctgccgattgccgaaaccttgcgcgtgctggggtatcaacgcgcggcagtggt |
| | gcacagcggcgggatggatgaagtttcattacacgcgccgacaatcgttgccgaactac |
| | atgacggcgaaattaagagctatcaattgaccgctgaagattttggcctgacaccctacc |
| | accaggagcaattggcaggcggaacaccggaagaaaaccgtgacattttaacacgctt |
| | gttacaaggtaaaggcgacgccgcccatgaagcagccgtcgcggcgaatgtcgccat |
| | gttaatgcgcctgcatggccatgaagatctgcaagccaatgcgcaaaccgttcttgaggt |
| | actgcgcagtggttccgcttacgacagagtcaccgcactggcggcacgagggtaa |
| trpC | atgcaaaccgttttagcgaaaatcgtcgcagacaaggcgatttgggtagaaacccgcaa |
| SEQ ID NO: 270 | agagcagcaaccgctggccagttttcagaatgaggttcagccgagcacgcgacattttt |
| | atgatgcacttcagggcgcacgcacggcgtttattctggagtgtaaaaaagcgtcgccgt |
| | caaaaggcgtgatccgtgatgatttcgatccggcacgcattgccgccatttataaacatta |
| | cgcttcggcaatttcagtgctgactgatgagaaatattttcaggggagctttgatttcctccc |
| | catcgtcagccaaatcgccccgcagccgattttatgtaaagacttcattatcgatccttacc |
| | agatctatctggcgcgctattaccaggccgatgcctgcttattaatgctttcagtactggat |
| | gacgaacaatatcgccagcttgcagccgtcgcccacagtctggagatgggtgtgctga |
| | ccgaagtcagtaatgaagaggaactggagcgcgccattgcattgggggcaaaggtcgt |
| | tggcatcaacaaccgcgatctgcgcgatttgtcgattgatctcaaccgtacccgcgagct |
| | tgcgccgaaactggggcacaacgtgacggtaatcagcgaatccggcatcaatacttac |
| | gctcaggtgcgcgagttaagccacttcgctaacggctttctgattggttcggcgttgatgg |
| | cccatgacgatttgaacgccgccgtgcgtcgggtgttgctgggtgagaataaagtatgtg |
| | gcctgacacgtgggcaagatgctaaagcagcttatgacgcgggcgcgatttacggtgg |
| | gttgatttttgttgcgacatcaccgcgttgcgtcaacgttgaacaggcgcaggaagtgatg |
| | gctgcagcaccgttgcagtatgttggcgtgttccgcaatcacgatattgccgatgtggcg |
| | gacaaagctaaggtgttatcgctggcggcagtgcaactgcatggtaatgaagatcagct |
| | gtatatcgacaatctgcgtgaggctctgccagcacacgtcgccatctggaaggctttaag |
| | tgtcggtgaaactcttcccgcgcgcgattttcagcacatcgataaatatgtattcgacaac |
| | ggtcagggcgggagcggacaacgtttcgactggtcactattaaatggtcaatcgcttgg |
| | caacgttctgctggcggggggcttaggcgcagataactgcgtggaagcggcacaaac |
| | cggctgcgccgggcttgattttaattctgctgtagagtcgcaaccgggtatcaaagacgc |
| | acgtcttttggcctcggttttccagacgctgcgcgcatattaa |
| trpB | atgacaacattacttaacccctattttggtgagtttggcggcatgtacgtgccacaaatcct |
| SEQ ID NO: 271 | gatgcctgctctgcgccagctggaagaagcttttgtcagcgcgcaaaaagatcctgaatt |
| | tcaggctcagttcaacgacctgctgaaaaactatgccgggcgtccaaccgcgctgacca |
| | aatgccagaacattacagccgggacgaacaccacgctgtatctgaagcgcgaagattt |
| | gctgcacggcggcgcgcataaaactaaccaggtgctcggtcaggctttactggcgaag |
| | cggatgggtaaaactgaaattattgccgaaaccggtgccggtcagcatggcgtggcgtc |
| | ggcccttgccagcgccctgctcggcctgaaatgccgaatttatatgggtgccaaagacg |
| | ttgaacgccagtcgcccaacgttttccggatgcgcttaatgggtgcggaagtgatcccg |
| | gtacatagcggttccgcgaccctgaaagatgcctgtaatgaggcgctacgcgactggtc |
| | cggcagttatgaaaccgcgcactatatgctgggtaccgcagctggcccgcatccttacc |
| | cgaccattgtgcgtgagtttcagcggatgattggcgaagaaacgaaagcgcagattctg |
| | gaaagagaaggtcgcctgccggatgccgttatcgcctgtgttggcggtggttcgaatgc |
| | catcggtatgtttgcagatttcatcaacgaaaccgacgtcggcctgattggtgtggagcct |
| | ggcggccacggtatcgaaactggcgagcacggcgcaccgttaaaacatggtcgcgtg |
| | ggcatctatttcggtatgaaagcgccgatgatgcaaaccgaagacgggcaaattgaaga |
| | gtcttactccatttctgccgggctggatttcccgtccgtcggcccgcaacatgcgtatctca |
| | acagcactggacgcgctgattacgtgtctattaccgacgatgaagccctggaagccttta |
| | aaacgctttgcctgcatgaagggatcatcccggcgctggaatcctcccacgccctggcc |
| | catgcgctgaaaatgatgcgcgaaaatccggaaaaagagcagctactggtggttaacct |
| | ttccggtcgcggcgataaagacatcttcaccgttcacgatattttgaaagcacgagggga |
| | aatctg |
| trpA | atggaacgctacgaatctctgtttgcccagttgaaggagcgcaaagaaggcgcattcgtt |
| SEQ ID NO: 272 | cctttcgtcaccctcggtgatccgggcattgagcagtcgttgaaaattatcgatacgctaat |
| | tgaagccggtgctgacgcgctggagttaggcatccccttctccgacccactggcggatg |
| | gcccgacgattcaaaacgccacactgcgtgcttttgcggcgggagtaaccccggcgca |
| | gtgctttgagatgctggcactcattcgccagaagcacccgaccattcccatcggccttttg |
| | atgtatgccaacctggtgtttaacaaaggcattgatgagttttatgccgagtgcgagaaag |
| | tcggcgtcgattcggtgctggttgccgatgtgcccgtggaagagtccgcgcccttccgc |
| | caggccgcgttgcgtcataatgtcgcacctatctttatttgcccgccgaatgccgacgatg |
| | atttgctgcgccagatagcctcttacggtcgtggttacacctatttgctgtcgcgagcggg |
| | cgtgaccggcgcagaaaaccgcgccgcgttacccctcaatcatctggttgcgaagctg |
| | aaagagtacaacgctgcgcctccattgcagggatttggtatttccgccccggatcaggta |
| | aaagccgcgattgatgcaggagctgcgggcgcgatttctggttcggccatcgttaaaat |
| | catcgagcaacatattaatgagccagagaaaatgctggcggcactgaaagcttttgtaca |
| | accgatgaaagcggcgacgcgcagttaa |
| fbrS40FTrpE- | ctctagaaataattttgtttaactttaagaaggagatatacatatgcaaacacaaaaaccga |
| DCBA (leader | ctctcgaactgctaacctgcgaaggcgcttatcgcgacaacccgactgcgctttttcacc |
| region and RBS | agttgtgtggggatcgtccggcaacgctgctgctggaattcgcagatatcgacagcaaa |
| underlined) | gatgatttaaaaagcctgctgctggtagacagtgcgctgcgcattacagcattaagtgac |
| SEQ ID NO: 273 | actgtcacaatccaggcgctttccggcaatggagaagccctgttgacactactggataac |
| | gccttgcctgcgggtgtggaaaatgaacaatcaccaaactgccgcgtactgcgcttccc |
| | gcctgtcagtccactgctggatgaagacgcccgcttatgctccctttcggtttttgacgcttt |
| | ccgcttattacagaatctgttgaatgtaccgaaggaagaacgagaagcaatgttcttcgg |
| | cggcctgttctcttatgaccttgtggcgggatttgaaaatttaccgcaactgtcagcggaa |
| | aatagctgccctgatttctgatttatctcgctgaaacgctgatggtgattgaccatcagaaa |
| | aaaagcactcgtattcaggccagcctgtttgctccgaatgaagaagaaaaacaacgtctc |
| | actgctcgcctgaacgaactacgtcagcaactgaccgaagccgcgccgccgctgccg |
| | gtggtttccgtgccgcatatgcgttgtgaatgtaaccagagcgatgaagagttcggtggt |
| | gtagtgcgtttgttgcaaaaagcgattcgcgccggagaaattttccaggtggtgccatctc |
| | gccgtttctctctgccctgcccgtcaccgctggcagcctattacgtgctgaaaaagagta |
| | atcccagcccgtacatgattttatgcaggataatgatttcaccctgtttggcgcgtcgccg |
| | gaaagttcgctcaagtatgacgccaccagccgccagattgagatttacccgattgccgg |
| | aacacgtccacgcggtcgtcgtgccgatggttcgctggacagagacctcgacagccgc |
| | atcgaactggagatgcgtaccgatcataaagagctttctgaacatctgatgctggtggatc |
| | tcgcccgtaatgacctggcacgcatttgcacacccggcagccgctacgtcgccgatctc |
| | accaaagttgaccgttactcttacgtgatgcacctagtctcccgcgttgttggtgagctgc |
| | gccacgatctcgacgccctgcacgcttaccgcgcctgtatgaatatggggacgttaagc |
| | ggtgcaccgaaagtacgcgctatgcagttaattgccgaagcagaaggtcgtcgacgcg |
| | gcagctacggcggcgcggtaggttattttaccgcgcatggcgatctcgacacctgcatt |
| | gtgatccgctcggcgctggtggaaaacggtatcgccaccgtgcaagccggtgctggcg |
| | tagtccttgattctgttccgcagtcggaagccgacgaaactcgtaataaagcccgcgctg |
| | tactgcgcgctattgccaccgcgcatcatgcacaggagacgttctaatggctgacattct |
| | gctgctcgataatatcgactcttttacgtacaacctggcagatcagttgcgcagcaatggt |
| | cataacgtggtgatttaccgcaaccatattccggcgcagaccttaattgaacgcctggcg |
| | acgatgagcaatccggtgctgatgctttctcctggccccggtgtgccgagcgaagccgg |
| | ttgtatgccggaactcctcacccgcttgcgtggcaagctgccaattattggcatttgcctc |
| | ggacatcaggcgattgtcgaagcttacgggggctatgtcggtcaggcgggcgaaattct |
| | tcacggtaaagcgtcgagcattgaacatgacggtcaggcgatgtttgccggattaacaa |
| | acccgctgccagtggcgcgttatcactcgctggttggcagtaacattccggccggtttaa |
| | ccatcaacgcccattttaatggcatggtgatggcggtgcgtcacgatgcagatcgcgttt |
| | gtggattccagttccatccggaatccattcttactacccagggcgctcgcctgctggaac |
| | aaacgctggcctgggcgcagcagaaactagagccaaccaacacgctgcaaccgattc |
| | tggaaaaactgtatcaggcacagacgcttagccaacaagaaagccaccagctgttttca |
| | gcggtggtacgtggcgagctgaagccggaacaactggcggcggcgctggtgagcat |
| | gaaaattcgcggtgaacacccgaacgagatcgccggggcagcaaccgcgctactgga |
| | aaacgccgcgccattcccgcgcccggattatctgtttgccgatatcgtcggtactggcgg |
| | tgacggcagcaacagcatcaatatttctaccgccagtgcgtttgtcgccgcggcctgcg |
| | ggctgaaagtggcgaaacacggcaaccgtagcgtctccagtaaatccggctcgtcgga |
| | tctgctggcggcgttcggtattaatcttgatatgaacgccgataaatcgcgccaggcgct |
| | ggatgagttaggcgtctgtttcctctttgcgccgaagtatcacaccggattccgccatgcg |
| | atgccggttcgccagcaactgaaaacccgcactctgttcaacgtgctgggaccattgatt |
| | aacccggcgcatccgccgctggcgctaattggtgtttatagtccggaactggtgctgcc |
| | gattgccgaaaccttgcgcgtgctggggtatcaacgcgcggcagtggtgcacagcggc |
| | gggatggatgaagtttcattacacgcgccgacaatcgttgccgaactacatgacggcga |
| | aattaagagctatcaattgaccgctgaagattttggcctgacaccctaccaccaggagca |
| | attggcaggcggaacaccggaagaaaaccgtgacattttaacacgcttgttacaaggta |
| | aaggcgacgccgcccatgaagcagccgtcgcggcgaatgtcgccatgttaatgcgcct |
| | gcatggccatgaagatctgcaagccaatgcgcaaaccgttcttgaggtactgcgcagtg |
| | gttccgcttacgacagagtcaccgcactggcggcacgagggtaaatgatgcaaaccgtt |
| | ttagcgaaaatcgtcgcagacaaggcgatttgggtagaaacccgcaaagagcagcaac |
| | cgctggccagttttcagaatgaggttcagccgagcacgcgacatttttatgatgcacttca |
| | gggcgcacgcacggcgtttattctggagtgtaaaaaagcgtcgccgtcaaaaggcgtg |
| | atccgtgatgatttcgatccggcacgcattgccgccatttataaacattacgcttcggcaat |
| | ttcagtgctgactgatgagaaatattttcaggggagctttgatttcctccccatcgtcagcc |
| | aaatcgccccgcagccgattttatgtaaagacttcattatcgatccttaccagatctatctg |
| | gcgcgctattaccaggccgatgcctgcttattaatgctttcagtactggatgacgaacaat |
| | atcgccagcttgcagccgtcgcccacagtctggagatgggtgtgctgaccgaagtcagt |
| | aatgaagaggaactggagcgcgccattgcattgggggcaaaggtcgttggcatcaaca |
| | accgcgatctgcgcgatttgtcgattgatctcaaccgtacccgcgagcttgcgccgaaac |
| | tggggcacaacgtgacggtaatcagcgaatccggcatcaatacttacgctcaggtgcgc |
| | gagttaagccacttcgctaacggctttctgattggttcggcgttgatggcccatgacgattt |
| | gaacgccgccgtgcgtcgggtgttgctgggtgagaataaagtatgtggcctgacacgtg |
| | ggcaagatgctaaagcagcttatgacgcgggcgcgatttacggtgggttgatttttgttgc |
| | gacatcaccgcgttgcgtcaacgttgaacaggcgcaggaagtgatggctgcagcaccg |
| | ttgcagtatgttggcgtgttccgcaatcacgatattgccgatgtggcggacaaagctaag |
| | gtgttatcgctggcggcagtgcaactgcatggtaatgaagatcagctgtatatcgacaat |
| | ctgcgtgaggctctgccagcacacgtcgccatctggaaggctttaagtgtcggtgaaact |
| | cttcccgcgcgcgattttcagcacatcgataaatatgtattcgacaacggtcagggcggg |
| | agcggacaacgtttcgactggtcactattaaatggtcaatcgcttggcaacgttctgctgg |
| | cggggggcttaggcgcagataactgcgtggaagcggcacaaaccggctgcgccggg |
| | cttgattttaattctgctgtagagtcgcaaccgggtatcaaagacgcacgtcttttggcctc |
| | ggttttccagacgctgcgcgcatattaaggaaaggaacaatgacaacattacttaacccc |
| | tattttggtgagtttggcggcatgtacgtgccacaaatcctgatgcctgctctgcgccagct |
| | ggaagaagcttttgtcagcgcgcaaaaagatcctgaatttcaggctcagttcaacgacct |
| | gctgaaaaactatgccgggcgtccaaccgcgctgaccaaatgccagaacattacagcc |
| | gggacgaacaccacgctgtatctgaagcgcgaagatttgctgcacggcggcgcgcata |
| | aaactaaccaggtgctcggtcaggctttactggcgaagcggatgggtaaaactgaaatt |
| | attgccgaaaccggtgccggtcagcatggcgtggcgtcggcccttgccagcgccctgc |
| | tcggcctgaaatgccgaatttatatgggtgccaaagacgttgaacgccagtcgcccaac |
| | gttttccggatgcgcttaatgggtgcggaagtgatcccggtacatagcggttccgcgacc |
| | ctgaaagatgcctgtaatgaggcgctacgcgactggtccggcagttatgaaaccgcgc |
| | actatatgctgggtaccgcagctggcccgcatccttacccgaccattgtgcgtgagtttca |
| | gcggatgattggcgaagaaacgaaagcgcagattctggaaagagaaggtcgcctgcc |
| | ggatgccgttatcgcctgtgttggcggtggttcgaatgccatcggtatgtttgcagatttca |
| | tcaacgaaaccgacgtcggcctgattggtgtggagcctggcggccacggtatcgaaac |
| | tggcgagcacggcgcaccgttaaaacatggtcgcgtgggcatctatttcggtatgaaag |
| | cgccgatgatgcaaaccgaagacgggcaaattgaagagtcttactccatttctgccggg |
| | ctggatttcccgtccgtcggcccgcaacatgcgtatctcaacagcactggacgcgctgat |
| | tacgtgtctattaccgacgatgaagccctggaagcctttaaaacgctttgcctgcatgaag |
| | ggatcatcccggcgctggaatcctcccacgccctggcccatgcgctgaaaatgatgcg |
| | cgaaaatccggaaaaagagcagctactggtggttaacctttccggtcgcggcgataaag |
| | acatcttcaccgttcacgatattttgaaagcacgaggggaaatctgatggaacgctacga |
| | atctctgtttgcccagttgaaggagcgcaaagaaggcgcattcgttcctttcgtcaccctc |
| | ggtgatccgggcattgagcagtcgttgaaaattatcgatacgctaattgaagccggtgct |
| | gacgcgctggagttaggcatccccttctccgacccactggcggatggcccgacgattca |
| | aaacgccacactgcgtgcttttgcggcgggagtaaccccggcgcagtgctttgagatgc |
| | tggcactcattcgccagaagcacccgaccattcccatcggccttttgatgtatgccaacct |
| | ggtgtttaacaaaggcattgatgagttttatgccgagtgcgagaaagtcggcgtcgattc |
| | ggtgctggttgccgatgtgcccgtggaagagtccgcgcccttccgccaggccgcgttg |
| | cgtcataatgtcgcacctatctttatttgcccgccgaatgccgacgatgatttgctgcgcca |
| | gatagcctcttacggtcgtggttacacctatttgctgtcgcgagcgggcgtgaccggcgc |
| | agaaaaccgcgccgcgttacccctcaatcatctggttgcgaagctgaaagagtacaacg |
| | ctgcgcctccattgcagggatttggtatttccgccccggatcaggtaaaagccgcgattg |
| | atgcaggagctgcgggcgcgatttctggttcggccatcgttaaaatcatcgagcaacata |
| | ttaatgagccagagaaaatgctggcggcactgaaagcttttgtacaaccgatgaaagcg |
| | gcgacgcgcagttaa |
| fbrTrpE | atgcaaacacaaaaaccgactctcgaactgctaacctgcgaaggcgcttatcgcgacaa |
| SEQ ID NO: 274 | cccgactgcgctttttcaccagttgtgtggggatcgtccggcaacgctgctgctggaattc |
| | gcagatatcgacagcaaagatgatttaaaaagcctgctgctggtagacagtgcgctgcg |
| | cattacagcattaagtgacactgtcacaatccaggcgctttccggcaatggagaagccct |
| | gttgacactactggataacgccttgcctgcgggtgtggaaaatgaacaatcaccaaactg |
| | ccgcgtactgcgcttcccgcctgtcagtccactgctggatgaagacgcccgcttatgctc |
| | cctttcggtttttgacgctttccgcttattacagaatctgttgaatgtaccgaaggaagaacg |
| | agaagcaatgttcttcggcggcctgttctcttatgaccttgtggcgggatttgaaaatttac |
| | cgcaactgtcagcggaaaatagctgccctgatttctgatttatctcgctgaaacgctgatg |
| | gtgattgaccatcagaaaaaaagcactcgtattcaggccagcctgtttgctccgaatgaa |
| | gaagaaaaacaacgtctcactgctcgcctgaacgaactacgtcagcaactgaccgaag |
| | ccgcgccgccgctgccggtggtttccgtgccgcatatgcgttgtgaatgtaaccagagc |
| | gatgaagagttcggtggtgtagtgcgtttgttgcaaaaagcgattcgcgccggagaaatt |
| | ttccaggtggtgccatctcgccgtttctctctgccctgcccgtcaccgctggcagcctatta |
| | cgtgctgaaaaagagtaatcccagcccgtacatgattttatgcaggataatgatttcaccc |
| | tgtttggcgcgtcgccggaaagttcgctcaagtatgacgccaccagccgccagattgag |
| | atttacccgattgccggaacacgtccacgcggtcgtcgtgccgatggttcgctggacag |
| | agacctcgacagccgcatcgaactggagatgcgtaccgatcataaagagctttctgaac |
| | atctgatgctggtggatctcgcccgtaatgacctggcacgcatttgcacacccggcagc |
| | cgctacgtcgccgatctcaccaaagttgaccgttactcttacgtgatgcacctagtctccc |
| | gcgttgttggtgagctgcgccacgatctcgacgccctgcacgcttaccgcgcctgtatga |
| | atatggggacgttaagcggtgcaccgaaagtacgcgctatgcagttaattgccgaagca |
| | gaaggtcgtcgacgcggcagctacggcggcgcggtaggttattttaccgcgcatggcg |
| | atctcgacacctgcattgtgatccgctcggcgctggtggaaaacggtatcgccaccgtg |
| | caagccggtgctggcgtagtccttgattctgttccgcagtcggaagccgacgaaactcgt |
| | aataaagcccgcgctgtactgcgcgctattgccaccgcgcatcatgcacaggagacgtt |
| | cta |
| trpDH- | ctctagaaataattttgtttaactttaagaaggagatatacatatgaattatcagaacgacga |
| fldABCDacuIfldH | tttacgcatcaaagaaatcaaagagttacttcctcctgtcgcattgctggaaaaattccccg |
| (leader region and | ctactgaaaatgccgcgaatacggtcgcccatgcccgaaaagcgatccataagatcctg |
| RBS underlined) | aaaggtaatgatgatcgcctgttggtggtgattggcccatgctcaattcatgatcctgtcgc |
| SEQ ID NO: 275 | ggctaaagagtatgccactcgcttgctgacgctgcgtgaagagctgcaagatgagctgg |
| | aaatcgtgatgcgcgtctattttgaaaagccgcgtactacggtgggctggaaagggctg |
| | attaacgatccgcatatggataacagcttccagatcaacgacggtctgcgtattgcccgc |
| | aaattgctgctcgatattaacgacagcggtctgccagcggcgggtgaattcctggatatg |
| | atcaccctacaatatctcgctgacctgatgagctggggcgcaattggcgcacgtaccac |
| | cgaatcgcaggtgcaccgcgaactggcgtctggtctttcttgtccggtaggtttcaaaaat |
| | ggcactgatggtacgattaaagtggctatcgatgccattaatgccgccggtgcgccgca |
| | ctgcttcctgtccgtaacgaaatgggggcattcggcgattgtgaataccagcggtaacg |
| | gcgattgccatatcattctgcgcggcggtaaagagcctaactacagcgcgaagcacgtt |
| | gctgaagtgaaagaagggctgaacaaagcaggcctgccagcgcaggtgatgatcgat |
| | ttcagccatgctaactcgtcaaaacaattcaaaaagcagatggatgtttgtactgacgtttg |
| | ccagcagattgccggtggcgaaaaggccattattggcgtgatggtggaaagccatctg |
| | gtggaaggcaatcagagcctcgagagcggggaaccgctggcctacggtaagagcatc |
| | accgatgcctgcattggctgggatgataccgatgctctgttacgtcaactggcgagtgca |
| | gtaaaagcgcgtcgcgggtaaTACTtaagaaggagatatacatATGCTGTT |
| | ATTCGAGACTGTGCGTGAAATGGGTCATGAGCAAGT |
| | CCTTTTCTGTCATAGCAAGAATCCCGAGATCAAGGCA |
| | ATTATCGCAATCCACGATACCACCTTAGGACCGGCTA |
| | TGGGCGCAACTCGTATCTTACCTTATATTAATGAGGA |
| | GGCTGCCCTGAAAGATGCATTACGTCTGTCCCGCGGA |
| | ATGACTTACAAAGCAGCCTGCGCCAATATTCCCGCCG |
| | GGGGCGGCAAAGCCGTCATCATCGCTAACCCCGAAA |
| | ACAAGACCGATGACCTGTTACGCGCATACGGCCGTTT |
| | CGTGGACAGCTTGAACGGCCGTTTCATCACCGGGCAG |
| | GACGTTAACATTACGCCCGACGACGTTCGCACTATTT |
| | CGCAGGAGACTAAGTACGTGGTAGGCGTCTCAGAAA |
| | AGTCGGGAGGGCCGGCACCTATCACCTCTCTGGGAGT |
| | ATTTTTAGGCATCAAAGCCGCTGTAGAGTCGCGTTGG |
| | CAGTCTAAACGCCTGGATGGCATGAAAGTGGCGGTG |
| | CAAGGACTTGGGAACGTAGGAAAAAATCTTTGTCGC |
| | CATCTGCATGAACACGATGTACAACTTTTTGTGTCTG |
| | ATGTCGATCCAATCAAGGCCGAGGAAGTAAAACGCT |
| | TATTCGGGGCGACTGTTGTCGAACCGACTGAAATCTA |
| | TTCTTTAGATGTTGATATTTTTGCACCGTGTGCACTTG |
| | GGGGTATTTTGAATAGCCATACCATCCCGTTCTTACA |
| | AGCCTCAATCATCGCAGGAGCAGCGAATAACCAGCT |
| | GGAGAACGAGCAACTTCATTCGCAGATGCTTGCGAA |
| | AAAGGGTATTCTTTACTCACCAGACTACGTTATCAAT |
| | GCAGGAGGACTTATCAATGTTTATAACGAAATGATCG |
| | GATATGACGAGGAAAAAGCATTCAAACAAGTTCATA |
| | ACATCTACGATACGTTATTAGCGATTTTCGAAATTGC |
| | AAAAGAACAAGGTGTAACCACCAACGACGCGGCCCG |
| | TCGTTTAGCAGAGGATCGTATCAACAACTCCAAACGC |
| | TCAAAGAGTAAAGCGATTGCGGCGTGAAATGtaagaagg |
| | agatatacatATGGAAAACAACACCAATATGTTCTCTGGAG |
| | TGAAGGTGATCGAACTGGCCAACTTTATCGCTGCTCC |
| | GGCGGCAGGTCGCTTCTTTGCTGATGGGGGAGCAGA |
| | AGTAATTAAGATCGAATCTCCAGCAGGCGACCCGCT |
| | GCGCTACACGGCCCCATCAGAAGGACGCCCGCTTTCT |
| | CAAGAGGAAAACACAACGTATGATTTGGAAAACGCG |
| | AATAAGAAAGCAATTGTTCTGAACTTAAAATCGGAA |
| | AAAGGAAAGAAAATTCTTCACGAGATGCTTGCTGAG |
| | GCAGACATCTTGTTAACAAATTGGCGCACGAAAGCG |
| | TTAGTCAAACAGGGGTTAGATTACGAAACACTGAAA |
| | GAGAAGTATCCAAAATTGGTATTTGCACAGATTACAG |
| | GATACGGGGAGAAAGGACCCGACAAAGACCTGCCTG |
| | GTTTCGACTACACGGCGTTTTTCGCCCGCGGAGGAGT |
| | CTCCGGTACATTATATGAAAAAGGAACTGTCCCTCCT |
| | AATGTGGTACCGGGTCTGGGTGACCACCAGGCAGGA |
| | ATGTTCTTAGCTGCCGGTATGGCTGGTGCGTTGTATA |
| | AGGCCAAAACCACCGGACAAGGCGACAAAGTCACCG |
| | TTAGTCTGATGCATAGCGCAATGTACGGCCTGGGAAT |
| | CATGATTCAGGCAGCCCAGTACAAGGACCATGGGCT |
| | GGTGTACCCGATCAACCGTAATGAAACGCCTAATCCT |
| | TTCATCGTTTCATACAAGTCCAAAGATGATTACTTTG |
| | TCCAAGTTTGCATGCCTCCCTATGATGTGTTTTATGAT |
| | CGCTTTATGACGGCCTTAGGACGTGAAGACTTGGTAG |
| | GTGACGAACGCTACAATAAGATCGAGAACTTGAAGG |
| | ATGGTCGCGCAAAAGAAGTCTATTCCATCATCGAACA |
| | ACAAATGGTAACGAAGACGAAGGACGAATGGGACA |
| | AGATTTTTCGTGATGCAGACATTCCATTCGCTATTGC |
| | CCAAACGTGGGAAGATCTTTTAGAAGACGAGCAGGC |
| | ATGGGCCAACGACTACCTGTATAAAATGAAGTATCCC |
| | ACAGGCAACGAACGTGCCCTGGTACGTTTACCTGTGT |
| | TCTTCAAAGAAGCTGGACTTCCTGAATACAACCAGTC |
| | GCCACAGATTGCTGAGAATACCGTGGAAGTGTTAAA |
| | GGAGATGGGATATACCGAGCAAGAAATTGAGGAGCT |
| | TGAGAAAGACAAAGACATCATGGTACGTAAAGAGAA |
| | ATGAAGGTtaagaaggagatatacatATGTCAGACCGCAACAA |
| | AGAAGTGAAAGAAAAGAAGGCTAAACACTATCTGCG |
| | CGAGATCACAGCTAAACACTACAAGGAAGCGTTAGA |
| | GGCTAAAGAGCGTGGGGAGAAAGTGGGTTGGTGTGC |
| | CTCTAACTTCCCCCAAGAGATTGCAACCACGTTGGGT |
| | GTAAAGGTTGTTTATCCCGAAAACCACGCCGCCGCCG |
| | TAGCGGCACGTGGCAATGGGCAAAATATGTGCGAAC |
| | ACGCGGAGGCTATGGGATTCAGTAATGATGTGTGTG |
| | GATATGCACGTGTAAATTTAGCCGTAATGGACATCGG |
| | CCATAGTGAAGATCAACCTATTCCAATGCCTGATTTC |
| | GTTCTGTGCTGTAATAATATCTGCAATCAGATGATTA |
| | AATGGTATGAACACATTGCAAAAACGTTGGATATTCC |
| | TATGATCCTTATCGATATTCCATATAATACTGAGAAC |
| | ACGGTGTCTCAGGACCGCATTAAGTACATCCGCGCCC |
| | AGTTCGATGACGCTATCAAGCAACTGGAAGAAATCA |
| | CTGGCAAAAAGTGGGACGAGAATAAATTCGAAGAAG |
| | TGATGAAGATTTCGCAAGAATCGGCCAAGCAATGGT |
| | TACGCGCCGCGAGCTACGCGAAATACAAACCATCAC |
| | CGTTTTCGGGCTTTGACCTTTTTAATCACATGGCTGTA |
| | GCCGTTTGTGCTCGCGGCACCCAGGAAGCCGCCGATG |
| | CATTCAAAATGTTAGCAGATGAATATGAAGAGAACG |
| | TTAAGACAGGAAAGTCTACTTATCGCGGCGAGGAGA |
| | AGCAGCGTATCTTGTTCGAGGGCATCGCTTGTTGGCC |
| | TTATCTGCGCCACAAGTTGACGAAACTGAGTGAATAT |
| | GGAATGAACGTCACAGCTACGGTGTACGCCGAAGCT |
| | TTTGGGGTTATTTACGAAAACATGGATGAACTGATGG |
| | CCGCTTACAATAAAGTGCCTAACTCAATCTCCTTCGA |
| | GAACGCGCTGAAGATGCGTCTTAATGCCGTTACAAGC |
| | ACCAATACAGAAGGGGCTGTTATCCACATTAATCGCA |
| | GTTGTAAGCTGTGGTCAGGATTCTTATACGAACTGGC |
| | CCGTCGTTTGGAAAAGGAGACGGGGATCCCTGTTGTT |
| | TCGTTCGACGGAGATCAAGCGGATCCCCGTAACTTCT |
| | CCGAGGCTCAATATGACACTCGCATCCAAGGTTTAAA |
| | TGAGGTGATGGTCGCGAAAAAAGAAGCAGAGTGAGC |
| | TTtaagaaggagatatacatATGTCGAATAGTGACAAGTTTTTT |
| | AACGACTTCAAGGACATTGTGGAAAACCCAAAGAAG |
| | TATATCATGAAGCATATGGAACAAACGGGACAAAAA |
| | GCCATCGGTTGCATGCCTTTATACACCCCAGAAGAGC |
| | TTGTCTTAGCGGCGGGTATGTTTCCTGTTGGAGTATG |
| | GGGCTCGAATACTGAGTTGTCAAAAGCCAAGACCTA |
| | CTTTCCGGCTTTTATCTGTTCTATCTTGCAAACTACTT |
| | TAGAAAACGCATTGAATGGGGAGTATGACATGCTGT |
| | CTGGTATGATGATCACAAACTATTGCGATTCGCTGAA |
| | ATGTATGGGACAAAACTTCAAACTTACAGTGGAAAA |
| | TATCGAATTCATCCCGGTTACGGTTCCACAAAACCGC |
| | AAGATGGAGGCGGGTAAAGAATTTCTGAAATCCCAG |
| | TATAAAATGAATATCGAACAACTGGAAAAAATCTCA |
| | GGGAATAAGATCACTGACGAGAGCTTGGAGAAGGCT |
| | ATTGAAATTTACGATGAGCACCGTAAAGTCATGAAC |
| | GATTTCTCTATGCTTGCGTCCAAGTACCCTGGTATCAT |
| | TACGCCAACGAAACGTAACTACGTGATGAAGTCAGC |
| | GTATTATATGGACAAGAAAGAACATACAGAGAAGGT |
| | ACGTCAGTTGATGGATGAAATCAAGGCCATTGAGCCT |
| | AAACCATTCGAAGGAAAACGCGTGATTACCACTGGG |
| | ATCATTGCAGATTCGGAGGACCTTTTGAAAATCTTGG |
| | AGGAGAATAACATTGCTATCGTGGGAGATGATATTG |
| | CACACGAGTCTCGCCAATACCGCACTTTGACCCCGGA |
| | GGCCAACACACCTATGGACCGTCTTGCTGAACAATTT |
| | GCGAACCGCGAGTGTTCGACGTTGTATGACCCTGAAA |
| | AAAAACGTGGACAGTATATTGTCGAGATGGCAAAAG |
| | AGCGTAAGGCCGACGGAATCATCTTCTTCATGACAAA |
| | ATTCTGCGATCCCGAAGAATACGATTACCCTCAGATG |
| | AAAAAAGACTTCGAAGAAGCCGGTATTCCCCACGTT |
| | CTGATTGAGACAGACATGCAAATGAAGAACTACGAA |
| | CAAGCTCGCACCGCTATTCAAGCATTTTCAGAAACCC |
| | TTTGACGCTtaagaaggagatatacatATGCGTGCTGTCTTAAT |
| | CGAGAAGTCAGATGACACCCAGAGTGTTTCAGTTAC |
| | GGAGTTGGCTGAAGACCAATTACCCGAAGGTGACGT |
| | CCTTGTGGATGTCGCGTACAGCACATTGAATTACAAG |
| | GATGCTCTTGCGATTACTGGAAAAGCACCCGTTGTAC |
| | GCCGTTTTCCTATGGTCCCCGGAATTGACTTTACTGG |
| | GACTGTCGCACAGAGTTCCCATGCTGATTTCAAGCCA |
| | GGCGACCGCGTAATTCTGAACGGATGGGGAGTTGGT |
| | GAGAAACACTGGGGCGGTCTTGCAGAACGCGCACGC |
| | GTACGTGGGGACTGGCTTGTCCCGTTGCCAGCCCCCT |
| | TAGACTTGCGCCAGGCTGCAATGATTGGCACTGCGGG |
| | GTACACAGCTATGCTGTGCGTGCTTGCCCTTGAGCGC |
| | CATGGAGTCGTACCTGGGAACGGCGAGATTGTCGTCT |
| | CAGGCGCAGCAGGAGGGGTAGGTTCTGTAGCAACCA |
| | CACTGTTAGCAGCCAAAGGCTACGAAGTGGCCGCCG |
| | TGACCGGGCGCGCAAGCGAGGCCGAATATTTACGCG |
| | GATTAGGCGCCGCGTCGGTCATTGATCGCAATGAATT |
| | AACGGGGAAGGTGCGTCCATTAGGGCAGGAACGCTG |
| | GGCAGGAGGAATCGATGTAGCAGGATCAACCGTACT |
| | TGCTAATATGTTGAGCATGATGAAATACCGTGGCGTG |
| | GTGGCGGCCTGTGGCCTGGCGGCTGGAATGGACTTGC |
| | CCGCGTCTGTCGCCCCTTTTATTCTGCGTGGTATGACT |
| | TTGGCAGGGGTAGATTCAGTCATGTGCCCCAAAACTG |
| | ATCGTCTGGCTGCTTGGGCACGCCTGGCATCCGACCT |
| | GGACCCTGCAAAGCTGGAAGAGATGACAACTGAATT |
| | ACCGTTCTCTGAGGTGATTGAAACGGCTCCGAAGTTC |
| | TTGGATGGAACAGTGCGTGGGCGTATTGTCATTCCGG |
| | TAACACCTTGATACTtaagaaggagatatacatATGAAAATCTT |
| | GGCATACTGCGTCCGCCCAGACGAGGTAGACTCCTTT |
| | AAGAAATTTAGTGAAAAGTACGGGCATACAGTTGAT |
| | CTTATTCCAGACTCTTTTGGACCTAATGTCGCTCATTT |
| | GGCGAAGGGTTACGATGGGATTTCTATTCTGGGCAAC |
| | GACACGTGTAACCGTGAGGCACTGGAGAAGATCAAG |
| | GATTGCGGGATCAAATATCTGGCAACCCGTACAGCC |
| | GGAGTGAACAACATTGACTTCGATGCAGCAAAGGAG |
| | TTCGGTATTAACGTGGCTAATGTTCCCGCATATTCCC |
| | CCAACTCGGTCAGCGAATTTACCATTGGATTGGCATT |
| | AAGTCTGACGCGTAAGATTCCATTTGCCCTGAAACGC |
| | GTGGAACTGAACAATTTTGCGCTTGGCGGCCTTATTG |
| | GTGTGGAATTGCGTAACTTAACTTTAGGAGTCATCGG |
| | TACTGGTCGCATCGGATTGAAAGTGATTGAGGGCTTC |
| | TCTGGGTTTGGAATGAAAAAAATGATCGGTTATGACA |
| | TTTTTGAAAATGAAGAAGCAAAGAAGTACATCGAAT |
| | ACAAATCATTAGACGAAGTTTTTAAAGAGGCTGATAT |
| | TATCACTCTGCATGCGCCTCTGACAGACGACAACTAT |
| | CATATGATTGGTAAAGAATCCATTGCTAAAATGAAG |
| | GATGGGGTATTTATTATCAACGCAGCGCGTGGAGCCT |
| | TAATCGATAGTGAGGCCCTGATTGAAGGGTTAAAATC |
| | GGGGAAGATT |
| fldA | ATGGAAAACAACACCAATATGTTCTCTGGAGTGAAG |
| SEQ ID NO: 276 | GTGATCGAACTGGCCAACTTTATCGCTGCTCCGGCGG |
| | CAGGTCGCTTCTTTGCTGATGGGGGAGCAGAAGTAAT |
| | TAAGATCGAATCTCCAGCAGGCGACCCGCTGCGCTAC |
| | ACGGCCCCATCAGAAGGACGCCCGCTTTCTCAAGAG |
| | GAAAACACAACGTATGATTTGGAAAACGCGAATAAG |
| | AAAGCAATTGTTCTGAACTTAAAATCGGAAAAAGGA |
| | AAGAAAATTCTTCACGAGATGCTTGCTGAGGCAGAC |
| | ATCTTGTTAACAAATTGGCGCACGAAAGCGTTAGTCA |
| | AACAGGGGTTAGATTACGAAACACTGAAAGAGAAGT |
| | ATCCAAAATTGGTATTTGCACAGATTACAGGATACGG |
| | GGAGAAAGGACCCGACAAAGACCTGCCTGGTTTCGA |
| | CTACACGGCGTTTTTCGCCCGCGGAGGAGTCTCCGGT |
| | ACATTATATGAAAAAGGAACTGTCCCTCCTAATGTGG |
| | TACCGGGTCTGGGTGACCACCAGGCAGGAATGTTCTT |
| | AGCTGCCGGTATGGCTGGTGCGTTGTATAAGGCCAAA |
| | ACCACCGGACAAGGCGACAAAGTCACCGTTAGTCTG |
| | ATGCATAGCGCAATGTACGGCCTGGGAATCATGATTC |
| | AGGCAGCCCAGTACAAGGACCATGGGCTGGTGTACC |
| | CGATCAACCGTAATGAAACGCCTAATCCTTTCATCGT |
| | TTCATACAAGTCCAAAGATGATTACTTTGTCCAAGTT |
| | TGCATGCCTCCCTATGATGTGTTTTATGATCGCTTTAT |
| | GACGGCCTTAGGACGTGAAGACTTGGTAGGTGACGA |
| | ACGCTACAATAAGATCGAGAACTTGAAGGATGGTCG |
| | CGCAAAAGAAGTCTATTCCATCATCGAACAACAAAT |
| | GGTAACGAAGACGAAGGACGAATGGGACAAGATTTT |
| | TCGTGATGCAGACATTCCATTCGCTATTGCCCAAACG |
| | TGGGAAGATCTTTTAGAAGACGAGCAGGCATGGGCC |
| | AACGACTACCTGTATAAAATGAAGTATCCCACAGGC |
| | AACGAACGTGCCCTGGTACGTTTACCTGTGTTCTTCA |
| | AAGAAGCTGGACTTCCTGAATACAACCAGTCGCCAC |
| | AGATTGCTGAGAATACCGTGGAAGTGTTAAAGGAGA |
| | TGGGATATACCGAGCAAGAAATTGAGGAGCTTGAGA |
| | AAGACAAAGACATCATGGTACGTAAAGAGAAATGA |
| fldB | ATGTCAGACCGCAACAAAGAAGTGAAAGAAAAGAA |
| SEQ ID NO: 277 | GGCTAAACACTATCTGCGCGAGATCACAGCTAAACA |
| | CTACAAGGAAGCGTTAGAGGCTAAAGAGCGTGGGGA |
| | GAAAGTGGGTTGGTGTGCCTCTAACTTCCCCCAAGAG |
| | ATTGCAACCACGTTGGGTGTAAAGGTTGTTTATCCCG |
| | AAAACCACGCCGCCGCCGTAGCGGCACGTGGCAATG |
| | GGCAAAATATGTGCGAACACGCGGAGGCTATGGGAT |
| | TCAGTAATGATGTGTGTGGATATGCACGTGTAAATTT |
| | AGCCGTAATGGACATCGGCCATAGTGAAGATCAACC |
| | TATTCCAATGCCTGATTTCGTTCTGTGCTGTAATAATA |
| | TCTGCAATCAGATGATTAAATGGTATGAACACATTGC |
| | AAAAACGTTGGATATTCCTATGATCCTTATCGATATT |
| | CCATATAATACTGAGAACACGGTGTCTCAGGACCGC |
| | ATTAAGTACATCCGCGCCCAGTTCGATGACGCTATCA |
| | AGCAACTGGAAGAAATCACTGGCAAAAAGTGGGACG |
| | AGAATAAATTCGAAGAAGTGATGAAGATTTCGCAAG |
| | AATCGGCCAAGCAATGGTTACGCGCCGCGAGCTACG |
| | CGAAATACAAACCATCACCGTTTTCGGGCTTTGACCT |
| | TTTTAATCACATGGCTGTAGCCGTTTGTGCTCGCGGC |
| | ACCCAGGAAGCCGCCGATGCATTCAAAATGTTAGCA |
| | GATGAATATGAAGAGAACGTTAAGACAGGAAAGTCT |
| | ACTTATCGCGGCGAGGAGAAGCAGCGTATCTTGTTCG |
| | AGGGCATCGCTTGTTGGCCTTATCTGCGCCACAAGTT |
| | GACGAAACTGAGTGAATATGGAATGAACGTCACAGC |
| | TACGGTGTACGCCGAAGCTTTTGGGGTTATTTACGAA |
| | AACATGGATGAACTGATGGCCGCTTACAATAAAGTG |
| | CCTAACTCAATCTCCTTCGAGAACGCGCTGAAGATGC |
| | GTCTTAATGCCGTTACAAGCACCAATACAGAAGGGG |
| | CTGTTATCCACATTAATCGCAGTTGTAAGCTGTGGTC |
| | AGGATTCTTATACGAACTGGCCCGTCGTTTGGAAAAG |
| | GAGACGGGGATCCCTGTTGTTTCGTTCGACGGAGATC |
| | AAGCGGATCCCCGTAACTTCTCCGAGGCTCAATATGA |
| | CACTCGCATCCAAGGTTTAAATGAGGTGATGGTCGCG |
| | AAAAAAGAAGCAGAGTGA |
| fldC | ATGTCGAATAGTGACAAGTTTTTTAACGACTTCAAGG |
| SEQ ID NO: 278 | ACATTGTGGAAAACCCAAAGAAGTATATCATGAAGC |
| | ATATGGAACAAACGGGACAAAAAGCCATCGGTTGCA |
| | TGCCTTTATACACCCCAGAAGAGCTTGTCTTAGCGGC |
| | GGGTATGTTTCCTGTTGGAGTATGGGGCTCGAATACT |
| | GAGTTGTCAAAAGCCAAGACCTACTTTCCGGCTTTTA |
| | TCTGTTCTATCTTGCAAACTACTTTAGAAAACGCATT |
| | GAATGGGGAGTATGACATGCTGTCTGGTATGATGATC |
| | ACAAACTATTGCGATTCGCTGAAATGTATGGGACAA |
| | AACTTCAAACTTACAGTGGAAAATATCGAATTCATCC |
| | CGGTTACGGTTCCACAAAACCGCAAGATGGAGGCGG |
| | GTAAAGAATTTCTGAAATCCCAGTATAAAATGAATAT |
| | CGAACAACTGGAAAAAATCTCAGGGAATAAGATCAC |
| | TGACGAGAGCTTGGAGAAGGCTATTGAAATTTACGA |
| | TGAGCACCGTAAAGTCATGAACGATTTCTCTATGCTT |
| | GCGTCCAAGTACCCTGGTATCATTACGCCAACGAAAC |
| | GTAACTACGTGATGAAGTCAGCGTATTATATGGACAA |
| | GAAAGAACATACAGAGAAGGTACGTCAGTTGATGGA |
| | TGAAATCAAGGCCATTGAGCCTAAACCATTCGAAGG |
| | AAAACGCGTGATTACCACTGGGATCATTGCAGATTCG |
| | GAGGACCTTTTGAAAATCTTGGAGGAGAATAACATT |
| | GCTATCGTGGGAGATGATATTGCACACGAGTCTCGCC |
| | AATACCGCACTTTGACCCCGGAGGCCAACACACCTAT |
| | GGACCGTCTTGCTGAACAATTTGCGAACCGCGAGTGT |
| | TCGACGTTGTATGACCCTGAAAAAAAACGTGGACAG |
| | TATATTGTCGAGATGGCAAAAGAGCGTAAGGCCGAC |
| | GGAATCATCTTCTTCATGACAAAATTCTGCGATCCCG |
| | AAGAATACGATTACCCTCAGATGAAAAAAGACTTCG |
| | AAGAAGCCGGTATTCCCCACGTTCTGATTGAGACAGA |
| | CATGCAAATGAAGAACTACGAACAAGCTCGCACCGC |
| | TATTCAAGCATTTTCAGAAACCCTTTG |
| AcuI | ATGCGTGCTGTCTTAATCGAGAAGTCAGATGACACCC |
| SEQ ID NO: 279 | AGAGTGTTTCAGTTACGGAGTTGGCTGAAGACCAATT |
| | ACCCGAAGGTGACGTCCTTGTGGATGTCGCGTACAGC |
| | ACATTGAATTACAAGGATGCTCTTGCGATTACTGGAA |
| | AAGCACCCGTTGTACGCCGTTTTCCTATGGTCCCCGG |
| | AATTGACTTTACTGGGACTGTCGCACAGAGTTCCCAT |
| | GCTGATTTCAAGCCAGGCGACCGCGTAATTCTGAACG |
| | GATGGGGAGTTGGTGAGAAACACTGGGGCGGTCTTG |
| | CAGAACGCGCACGCGTACGTGGGGACTGGCTTGTCC |
| | CGTTGCCAGCCCCCTTAGACTTGCGCCAGGCTGCAAT |
| | GATTGGCACTGCGGGGTACACAGCTATGCTGTGCGTG |
| | CTTGCCCTTGAGCGCCATGGAGTCGTACCTGGGAACG |
| | GCGAGATTGTCGTCTCAGGCGCAGCAGGAGGGGTAG |
| | GTTCTGTAGCAACCACACTGTTAGCAGCCAAAGGCTA |
| | CGAAGTGGCCGCCGTGACCGGGCGCGCAAGCGAGGC |
| | CGAATATTTACGCGGATTAGGCGCCGCGTCGGTCATT |
| | GATCGCAATGAATTAACGGGGAAGGTGCGTCCATTA |
| | GGGCAGGAACGCTGGGCAGGAGGAATCGATGTAGCA |
| | GGATCAACCGTACTTGCTAATATGTTGAGCATGATGA |
| | AATACCGTGGCGTGGTGGCGGCCTGTGGCCTGGCGG |
| | CTGGAATGGACTTGCCCGCGTCTGTCGCCCCTTTTATT |
| | CTGCGTGGTATGACTTTGGCAGGGGTAGATTCAGTCA |
| | TGTGCCCCAAAACTGATCGTCTGGCTGCTTGGGCACG |
| | CCTGGCATCCGACCTGGACCCTGCAAAGCTGGAAGA |
| | GATGACAACTGAATTACCGTTCTCTGAGGTGATTGAA |
| | ACGGCTCCGAAGTTCTTGGATGGAACAGTGCGTGGG |
| | CGTATTGTCATTCCGGTAACACCTTGA |
| fldH1 | ATGAAAATCTTGGCATACTGCGTCCGCCCAGACGAG |
| SEQ ID NO: 280 | GTAGACTCCTTTAAGAAATTTAGTGAAAAGTACGGGC |
| | ATACAGTTGATCTTATTCCAGACTCTTTTGGACCTAAT |
| | GTCGCTCATTTGGCGAAGGGTTACGATGGGATTTCTA |
| | TTCTGGGCAACGACACGTGTAACCGTGAGGCACTGG |
| | AGAAGATCAAGGATTGCGGGATCAAATATCTGGCAA |
| | CCCGTACAGCCGGAGTGAACAACATTGACTTCGATGC |
| | AGCAAAGGAGTTCGGTATTAACGTGGCTAATGTTCCC |
| | GCATATTCCCCCAACTCGGTCAGCGAATTTACCATTG |
| | GATTGGCATTAAGTCTGACGCGTAAGATTCCATTTGC |
| | CCTGAAACGCGTGGAACTGAACAATTTTGCGCTTGGC |
| | GGCCTTATTGGTGTGGAATTGCGTAACTTAACTTTAG |
| | GAGTCATCGGTACTGGTCGCATCGGATTGAAAGTGAT |
| | TGAGGGCTTCTCTGGGTTTGGAATGAAAAAAATGATC |
| | GGTTATGACATTTTTGAAAATGAAGAAGCAAAGAAG |
| | TACATCGAATACAAATCATTAGACGAAGTTTTTAAAG |
| | AGGCTGATATTATCACTCTGCATGCGCCTCTGACAGA |
| | CGACAACTATCATATGATTGGTAAAGAATCCATTGCT |
| | AAAATGAAGGATGGGGTATTTATTATCAACGCAGCG |
| | CGTGGAGCCTTAATCGATAGTGAGGCCCTGATTGAAG |
| | GGTTAAAATCGGGGAAGATTGCGGGCGCGGCTCTGG |
| | ATAGCTATGAGTATGAGCAAGGTGTCTTTCACAACAA |
| | TAAGATGAATGAAATTATGCAGGATGATACCTTGGA |
| | ACGTCTGAAATCTTTTCCCAACGTCGTGATCACGCCG |
| | CATTTGGGTTTTTATACTGATGAGGCGGTTTCCAATA |
| | TGGTAGAGATCACACTGATGAACCTTCAGGAATTCGA |
| | GTTGAAAGGAACCTGTAAGAACCAGCGTGTTTGTAA |
| | ATGA |
| fbrAroG-TrpDH- | Ctctagaaataattttgtttaactttaagaaggagatatacat |
| fldABCDH (RBS | atgaattatcagaacgacgatttacgcatcaaagaaatcaaagagttacttcctcctgtcg |
| and leader region | cattgctggaaaaattccccgctactgaaaatgccgcgaatacggtcgcccatgcccga |
| underlined) | aaagcgatccataagatcctgaaaggtaatgatgatcgcctgttggtggtgattggccca |
| SEQ ID NO: 281 | tgctcaattcatgatcctgtcgcggctaaagagtatgccactcgcttgctgacgctgcgtg |
| | aagagctgcaagatgagctggaaatcgtgatgcgcgtctattttgaaaagccgcgtacta |
| | cggtgggctggaaagggctgattaacgatccgcatatggataacagcttccagatcaac |
| | gacggtctgcgtattgcccgcaaattgctgctcgatattaacgacagcggtctgccagcg |
| | gcgggtgaattcctggatatgatcaccctacaatatctcgctgacctgatgagctggggc |
| | gcaattggcgcacgtaccaccgaatcgcaggtgcaccgcgaactggcgtctggtctttc |
| | ttgtccggtaggtttcaaaaatggcactgatggtacgattaaagtggctatcgatgccatta |
| | atgccgccggtgcgccgcactgcttcctgtccgtaacgaaatgggggcattcggcgatt |
| | gtgaataccagcggtaacggcgattgccatatcattctgcgcggcggtaaagagcctaa |
| | ctacagcgcgaagcacgttgctgaagtgaaagaagggctgaacaaagcaggcctgcc |
| | agcgcaggtgatgatcgatttcagccatgctaactcgtcaaaacaattcaaaaagcagat |
| | ggatgtttgtactgacgtttgccagcagattgccggtggcgaaaaggccattattggcgt |
| | gatggtggaaagccatctggtggaaggcaatcagagcctcgagagcggggaaccgct |
| | ggcctacggtaagagcatcaccgatgcctgcattggctgggatgataccgatgctctgtt |
| | acgtcaactggcgagtgcagtaaaagcgcgtcgcgggtaaTACTtaagaaggaga |
| | tatacatATGCTGTTATTCGAGACTGTGCGTGAAATGGGT |
| | CATGAGCAAGTCCTTTTCTGTCATAGCAAGAATCCCG |
| | AGATCAAGGCAATTATCGCAATCCACGATACCACCTT |
| | AGGACCGGCTATGGGCGCAACTCGTATCTTACCTTAT |
| | ATTAATGAGGAGGCTGCCCTGAAAGATGCATTACGTC |
| | TGTCCCGCGGAATGACTTACAAAGCAGCCTGCGCCA |
| | ATATTCCCGCCGGGGGCGGCAAAGCCGTCATCATCGC |
| | TAACCCCGAAAACAAGACCGATGACCTGTTACGCGC |
| | ATACGGCCGTTTCGTGGACAGCTTGAACGGCCGTTTC |
| | ATCACCGGGCAGGACGTTAACATTACGCCCGACGAC |
| | GTTCGCACTATTTCGCAGGAGACTAAGTACGTGGTAG |
| | GCGTCTCAGAAAAGTCGGGAGGGCCGGCACCTATCA |
| | CCTCTCTGGGAGTATTTTTAGGCATCAAAGCCGCTGT |
| | AGAGTCGCGTTGGCAGTCTAAACGCCTGGATGGCAT |
| | GAAAGTGGCGGTGCAAGGACTTGGGAACGTAGGAAA |
| | AAATCTTTGTCGCCATCTGCATGAACACGATGTACAA |
| | CTTTTTGTGTCTGATGTCGATCCAATCAAGGCCGAGG |
| | AAGTAAAACGCTTATTCGGGGCGACTGTTGTCGAACC |
| | GACTGAAATCTATTCTTTAGATGTTGATATTTTTGCAC |
| | CGTGTGCACTTGGGGGTATTTTGAATAGCCATACCAT |
| | CCCGTTCTTACAAGCCTCAATCATCGCAGGAGCAGCG |
| | AATAACCAGCTGGAGAACGAGCAACTTCATTCGCAG |
| | ATGCTTGCGAAAAAGGGTATTCTTTACTCACCAGACT |
| | ACGTTATCAATGCAGGAGGACTTATCAATGTTTATAA |
| | CGAAATGATCGGATATGACGAGGAAAAAGCATTCAA |
| | ACAAGTTCATAACATCTACGATACGTTATTAGCGATT |
| | TTCGAAATTGCAAAAGAACAAGGTGTAACCACCAAC |
| | GACGCGGCCCGTCGTTTAGCAGAGGATCGTATCAAC |
| | AACTCCAAACGCTCAAAGAGTAAAGCGATTGCGGCG |
| | TGAAATGtaagaaggagatatacatATGGAAAACAACACCAAT |
| | ATGTTCTCTGGAGTGAAGGTGATCGAACTGGCCAACT |
| | TTATCGCTGCTCCGGCGGCAGGTCGCTTCTTTGCTGA |
| | TGGGGGAGCAGAAGTAATTAAGATCGAATCTCCAGC |
| | AGGCGACCCGCTGCGCTACACGGCCCCATCAGAAGG |
| | ACGCCCGCTTTCTCAAGAGGAAAACACAACGTATGA |
| | TTTGGAAAACGCGAATAAGAAAGCAATTGTTCTGAA |
| | CTTAAAATCGGAAAAAGGAAAGAAAATTCTTCACGA |
| | GATGCTTGCTGAGGCAGACATCTTGTTAACAAATTGG |
| | CGCACGAAAGCGTTAGTCAAACAGGGGTTAGATTAC |
| | GAAACACTGAAAGAGAAGTATCCAAAATTGGTATTT |
| | GCACAGATTACAGGATACGGGGAGAAAGGACCCGAC |
| | AAAGACCTGCCTGGTTTCGACTACACGGCGTTTTTCG |
| | CCCGCGGAGGAGTCTCCGGTACATTATATGAAAAAG |
| | GAACTGTCCCTCCTAATGTGGTACCGGGTCTGGGTGA |
| | CCACCAGGCAGGAATGTTCTTAGCTGCCGGTATGGCT |
| | GGTGCGTTGTATAAGGCCAAAACCACCGGACAAGGC |
| | GACAAAGTCACCGTTAGTCTGATGCATAGCGCAATGT |
| | ACGGCCTGGGAATCATGATTCAGGCAGCCCAGTACA |
| | AGGACCATGGGCTGGTGTACCCGATCAACCGTAATG |
| | AAACGCCTAATCCTTTCATCGTTTCATACAAGTCCAA |
| | AGATGATTACTTTGTCCAAGTTTGCATGCCTCCCTAT |
| | GATGTGTTTTATGATCGCTTTATGACGGCCTTAGGAC |
| | GTGAAGACTTGGTAGGTGACGAACGCTACAATAAGA |
| | TCGAGAACTTGAAGGATGGTCGCGCAAAAGAAGTCT |
| | ATTCCATCATCGAACAACAAATGGTAACGAAGACGA |
| | AGGACGAATGGGACAAGATTTTTCGTGATGCAGACA |
| | TTCCATTCGCTATTGCCCAAACGTGGGAAGATCTTTT |
| | AGAAGACGAGCAGGCATGGGCCAACGACTACCTGTA |
| | TAAAATGAAGTATCCCACAGGCAACGAACGTGCCCT |
| | GGTACGTTTACCTGTGTTCTTCAAAGAAGCTGGACTT |
| | CCTGAATACAACCAGTCGCCACAGATTGCTGAGAAT |
| | ACCGTGGAAGTGTTAAAGGAGATGGGATATACCGAG |
| | CAAGAAATTGAGGAGCTTGAGAAAGACAAAGACATC |
| | ATGGTACGTAAAGAGAAATGAAGGTtaagaaggagatatacat |
| | ATGTCAGACCGCAACAAAGAAGTGAAAGAAAAGAA |
| | GGCTAAACACTATCTGCGCGAGATCACAGCTAAACA |
| | CTACAAGGAAGCGTTAGAGGCTAAAGAGCGTGGGGA |
| | GAAAGTGGGTTGGTGTGCCTCTAACTTCCCCCAAGAG |
| | ATTGCAACCACGTTGGGTGTAAAGGTTGTTTATCCCG |
| | AAAACCACGCCGCCGCCGTAGCGGCACGTGGCAATG |
| | GGCAAAATATGTGCGAACACGCGGAGGCTATGGGAT |
| | TCAGTAATGATGTGTGTGGATATGCACGTGTAAATTT |
| | AGCCGTAATGGACATCGGCCATAGTGAAGATCAACC |
| | TATTCCAATGCCTGATTTCGTTCTGTGCTGTAATAATA |
| | TCTGCAATCAGATGATTAAATGGTATGAACACATTGC |
| | AAAAACGTTGGATATTCCTATGATCCTTATCGATATT |
| | CCATATAATACTGAGAACACGGTGTCTCAGGACCGC |
| | ATTAAGTACATCCGCGCCCAGTTCGATGACGCTATCA |
| | AGCAACTGGAAGAAATCACTGGCAAAAAGTGGGACG |
| | AGAATAAATTCGAAGAAGTGATGAAGATTTCGCAAG |
| | AATCGGCCAAGCAATGGTTACGCGCCGCGAGCTACG |
| | CGAAATACAAACCATCACCGTTTTCGGGCTTTGACCT |
| | TTTTAATCACATGGCTGTAGCCGTTTGTGCTCGCGGC |
| | ACCCAGGAAGCCGCCGATGCATTCAAAATGTTAGCA |
| | GATGAATATGAAGAGAACGTTAAGACAGGAAAGTCT |
| | ACTTATCGCGGCGAGGAGAAGCAGCGTATCTTGTTCG |
| | AGGGCATCGCTTGTTGGCCTTATCTGCGCCACAAGTT |
| | GACGAAACTGAGTGAATATGGAATGAACGTCACAGC |
| | TACGGTGTACGCCGAAGCTTTTGGGGTTATTTACGAA |
| | AACATGGATGAACTGATGGCCGCTTACAATAAAGTG |
| | CCTAACTCAATCTCCTTCGAGAACGCGCTGAAGATGC |
| | GTCTTAATGCCGTTACAAGCACCAATACAGAAGGGG |
| | CTGTTATCCACATTAATCGCAGTTGTAAGCTGTGGTC |
| | AGGATTCTTATACGAACTGGCCCGTCGTTTGGAAAAG |
| | GAGACGGGGATCCCTGTTGTTTCGTTCGACGGAGATC |
| | AAGCGGATCCCCGTAACTTCTCCGAGGCTCAATATGA |
| | CACTCGCATCCAAGGTTTAAATGAGGTGATGGTCGCG |
| | AAAAAAGAAGCAGAGTGAGCTTtaagaaggagatatacatATG |
| | TCGAATAGTGACAAGTTTTTTAACGACTTCAAGGACA |
| | TTGTGGAAAACCCAAAGAAGTATATCATGAAGCATA |
| | TGGAACAAACGGGACAAAAAGCCATCGGTTGCATGC |
| | CTTTATACACCCCAGAAGAGCTTGTCTTAGCGGCGGG |
| | TATGTTTCCTGTTGGAGTATGGGGCTCGAATACTGAG |
| | TTGTCAAAAGCCAAGACCTACTTTCCGGCTTTTATCT |
| | GTTCTATCTTGCAAACTACTTTAGAAAACGCATTGAA |
| | TGGGGAGTATGACATGCTGTCTGGTATGATGATCACA |
| | AACTATTGCGATTCGCTGAAATGTATGGGACAAAACT |
| | TCAAACTTACAGTGGAAAATATCGAATTCATCCCGGT |
| | TACGGTTCCACAAAACCGCAAGATGGAGGCGGGTAA |
| | AGAATTTCTGAAATCCCAGTATAAAATGAATATCGAA |
| | CAACTGGAAAAAATCTCAGGGAATAAGATCACTGAC |
| | GAGAGCTTGGAGAAGGCTATTGAAATTTACGATGAG |
| | CACCGTAAAGTCATGAACGATTTCTCTATGCTTGCGT |
| | CCAAGTACCCTGGTATCATTACGCCAACGAAACGTAA |
| | CTACGTGATGAAGTCAGCGTATTATATGGACAAGAA |
| | AGAACATACAGAGAAGGTACGTCAGTTGATGGATGA |
| | AATCAAGGCCATTGAGCCTAAACCATTCGAAGGAAA |
| | ACGCGTGATTACCACTGGGATCATTGCAGATTCGGAG |
| | GACCTTTTGAAAATCTTGGAGGAGAATAACATTGCTA |
| | TCGTGGGAGATGATATTGCACACGAGTCTCGCCAATA |
| | CCGCACTTTGACCCCGGAGGCCAACACACCTATGGAC |
| | CGTCTTGCTGAACAATTTGCGAACCGCGAGTGTTCGA |
| | CGTTGTATGACCCTGAAAAAAAACGTGGACAGTATA |
| | TTGTCGAGATGGCAAAAGAGCGTAAGGCCGACGGAA |
| | TCATCTTCTTCATGACAAAATTCTGCGATCCCGAAGA |
| | ATACGATTACCCTCAGATGAAAAAAGACTTCGAAGA |
| | AGCCGGTATTCCCCACGTTCTGATTGAGACAGACATG |
| | CAAATGAAGAACTACGAACAAGCTCGCACCGCTATT |
| | CAAGCATTTTCAGAAACCCTTTGACGCTtaagaaggagatata |
| | catATGTTCTTTACGGAGCAACACGAACTTATTCGCAA |
| | ACTGGCGCGTGACTTTGCCGAACAGGAAATCGAGCC |
| | TATCGCAGACGAAGTAGATAAAACCGCAGAGTTCCC |
| | AAAAGAAATCGTGAAGAAGATGGCTCAAAATGGATT |
| | TTTCGGCATTAAAATGCCTAAAGAATACGGAGGGGC |
| | GGGTGCGGATAACCGCGCTTATGTCACTATTATGGAG |
| | GAAATTTCACGTGCTTCCGGGGTAGCGGGTATCTACC |
| | TGAGCTCGCCGAACAGTTTGTTAGGAACTCCCTTCTT |
| | ATTGGTCGGAACCGATGAGCAAAAAGAAAAGTACCT |
| | TAAGCCTATGATCCGCGGCGAGAAGACTCTGGCGTTC |
| | GCCCTGACAGAGCCTGGTGCTGGCTCTGATGCGGGTG |
| | CGTTGGCTACTACTGCCCGTGAAGAGGGCGACTATTA |
| | TATCTTAAATGGCCGCAAGACGTTTATTACAGGGGCT |
| | CCTATTAGCGACAATATTATTGTGTTCGCAAAAACCG |
| | ATATGAGCAAAGGGACCAAAGGTATCACCACTTTCA |
| | TTGTGGACTCAAAGCAGGAAGGGGTAAGTTTTGGTA |
| | AGCCAGAGGACAAAATGGGAATGATTGGTTGTCCGA |
| | CAAGCGACATCATCTTGGAAAACGTTAAAGTTCATAA |
| | GTCCGACATCTTGGGAGAAGTCAATAAGGGGTTTATT |
| | ACCGCGATGAAAACACTTTCCGTTGGTCGTATCGGAG |
| | TGGCGTCACAGGCGCTTGGAATTGCACAGGCCGCCGT |
| | AGATGAGGCGGTAAAGTACGCCAAGCAACGTAAACA |
| | ATTCAATCGCCCAATCGCGAAATTTCAGGCCATTCAA |
| | TTTAAACTTGCCAATATGGAGACTAAATTAAATGCCG |
| | CTAAACTTCTTGTTTATAACGCAGCGTACAAAATGGA |
| | TTGTGGAGAAAAAGCCGACAAGGAAGCCTCTATGGC |
| | TAAATACTTTGCTGCTGAATCAGCGATCCAAATCGTT |
| | AACGACGCGCTGCAAATCCATGGCGGGTATGGCTAT |
| | ATCAAAGACTACAAGATTGAACGTTTGTACCGCGATG |
| | TGCGTGTGATCGCTATTTATGAGGGCACTTCCGAGGT |
| | CCAACAGATGGTTATCGCGTCCAATCTGCTGAAGTAA |
| | TACTtaagaaggagatatacatATGAAAATCTTGGCATACTGCG |
| | TCCGCCCAGACGAGGTAGACTCCTTTAAGAAATTTAG |
| | TGAAAAGTACGGGCATACAGTTGATCTTATTCCAGAC |
| | TCTTTTGGACCTAATGTCGCTCATTTGGCGAAGGGTT |
| | ACGATGGGATTTCTATTCTGGGCAACGACACGTGTAA |
| | CCGTGAGGCACTGGAGAAGATCAAGGATTGCGGGAT |
| | CAAATATCTGGCAACCCGTACAGCCGGAGTGAACAA |
| | CATTGACTTCGATGCAGCAAAGGAGTTCGGTATTAAC |
| | GTGGCTAATGTTCCCGCATATTCCCCCAACTCGGTCA |
| | GCGAATTTACCATTGGATTGGCATTAAGTCTGACGCG |
| | TAAGATTCCATTTGCCCTGAAACGCGTGGAACTGAAC |
| | AATTTTGCGCTTGGCGGCCTTATTGGTGTGGAATTGC |
| | GTAACTTAACTTTAGGAGTCATCGGTACTGGTCGCAT |
| | CGGATTGAAAGTGATTGAGGGCTTCTCTGGGTTTGGA |
| | ATGAAAAAAATGATCGGTTATGACATTTTTGAAAATG |
| | AAGAAGCAAAGAAGTACATCGAATACAAATCATTAG |
| | ACGAAGTTTTTAAAGAGGCTGATATTATCACTCTGCA |
| | TGCGCCTCTGACAGACGACAACTATCATATGATTGGT |
| | AAAGAATCCATTGCTAAAATGAAGGATGGGGTATTT |
| | ATTATCAACGCAGCGCGTGGAGCCTTAATCGATAGTG |
| | AGGCCCTGATTGAAGGGTTAAAATCGGGGAAGATTG |
| | CGGGCGCGGCTCTGGATAGCTATGAGTATGAGCAAG |
| | GTGTCTTTCACAACAATAAGATGAATGAAATTATGCA |
| | GGATGATACCTTGGAACGTCTGAAATCTTTTCCCAAC |
| | GTCGTGATCACGCCGCATTTGGGTTTTTATACTGATG |
| | AGGCGGTTTCCAATATGGTAGAGATCACACTGATGA |
| | ACCTTCAGGAATTCGAGTTGAAAGGAACCTGTAAGA |
| | ACCAGCGTGTTTGTAAATGA |
| FldD | ATGTTCTTTACGGAGCAACACGAACTTATTCGCAAAC |
| SEQ ID NO: 282 | TGGCGCGTGACTTTGCCGAACAGGAAATCGAGCCTAT |
| | CGCAGACGAAGTAGATAAAACCGCAGAGTTCCCAAA |
| | AGAAATCGTGAAGAAGATGGCTCAAAATGGATTTTT |
| | CGGCATTAAAATGCCTAAAGAATACGGAGGGGCGGG |
| | TGCGGATAACCGCGCTTATGTCACTATTATGGAGGAA |
| | ATTTCACGTGCTTCCGGGGTAGCGGGTATCTACCTGA |
| | GCTCGCCGAACAGTTTGTTAGGAACTCCCTTCTTATT |
| | GGTCGGAACCGATGAGCAAAAAGAAAAGTACCTTAA |
| | GCCTATGATCCGCGGCGAGAAGACTCTGGCGTTCGCC |
| | CTGACAGAGCCTGGTGCTGGCTCTGATGCGGGTGCGT |
| | TGGCTACTACTGCCCGTGAAGAGGGCGACTATTATAT |
| | CTTAAATGGCCGCAAGACGTTTATTACAGGGGCTCCT |
| | ATTAGCGACAATATTATTGTGTTCGCAAAAACCGATA |
| | TGAGCAAAGGGACCAAAGGTATCACCACTTTCATTGT |
| | GGACTCAAAGCAGGAAGGGGTAAGTTTTGGTAAGCC |
| | AGAGGACAAAATGGGAATGATTGGTTGTCCGACAAG |
| | CGACATCATCTTGGAAAACGTTAAAGTTCATAAGTCC |
| | GACATCTTGGGAGAAGTCAATAAGGGGTTTATTACCG |
| | CGATGAAAACACTTTCCGTTGGTCGTATCGGAGTGGC |
| | GTCACAGGCGCTTGGAATTGCACAGGCCGCCGTAGA |
| | TGAGGCGGTAAAGTACGCCAAGCAACGTAAACAATT |
| | CAATCGCCCAATCGCGAAATTTCAGGCCATTCAATTT |
| | AAACTTGCCAATATGGAGACTAAATTAAATGCCGCTA |
| | AACTTCTTGTTTATAACGCAGCGTACAAAATGGATTG |
| | TGGAGAAAAAGCCGACAAGGAAGCCTCTATGGCTAA |
| | ATACTTTGCTGCTGAATCAGCGATCCAAATCGTTAAC |
| | GACGCGCTGCAAATCCATGGCGGGTATGGCTATATCA |
| | AAGACTACAAGATTGAACGTTTGTACCGCGATGTGCG |
| | TGTGATCGCTATTTATGAGGGCACTTCCGAGGTCCAA |
| | CAGATGGTTATCGCGTCCAATCTGCTGAAGTAA |
| RBS | taagaaggagatatacat |
| SEQ ID NO: 283 | |
| RBS | ctctagaaataattttgtttaactttaagaaggagatatacat |
| SEQ ID NO: 284 | |

[1122] In one embodiment, the genetically engineered bacteria comprise a sequence which has at least about 80% identity with one or more sequences of Table 59. In another embodiment, the genetically engineered bacteria comprise a sequence which has at least about 85% identity with one or more sequences of Table 59. In one embodiment, the genetically engineered bacteria comprise a sequence which has at least about 90% identity with one or more sequences of Table 59. In one embodiment, the genetically engineered bacteria comprise a sequence which has at least about 95% identity with one or more sequences of Table 59. In another embodiment, the bcd2 gene has at least about 96%, 97%, 98%, or 99% identity with one or more sequences of Table 59. Accordingly, in one embodiment, the genetically engineered bacteria comprise a sequence which has at least about 80%, 81%, 82%, 83%, 84%, 85%, 86%, 87%, 88%, 89%, 90%, 91%, 92%, 93%, 94%, 95%, 96%, 97%, 98%, or 99% identity with one or more sequences of Table 59. In another embodiment, the genetically engineered bacteria comprise the sequence of SEQ ID NO: 263. In yet another embodiment the genetically engineered bacteria comprise a sequence which consists of the sequence of with one or more sequences of Table 59.

[1123] In one embodiment, the genetically engineered bacteria comprise a sequence which has at least about 80% identity with SEQ ID NO: 263. In another embodiment, the genetically engineered bacteria comprise a sequence which has at least about 85% identity with SEQ ID NO: 263. In one embodiment, the genetically engineered bacteria comprise a sequence which has at least about 90% identity with SEQ ID NO: 263. In one embodiment, the genetically engineered bacteria comprise a sequence which has at least about 95% identity with SEQ ID NO: 263. In another embodiment, the bcd2 gene has at least about 96%, 97%, 98%, or 99% identity with SEQ ID NO: 263. Accordingly, in one embodiment, the genetically engineered bacteria comprise a sequence which has at least about 80%, 81%, 82%, 83%, 84%, 85%, 86%, 87%, 88%, 89%, 90%, 91%, 92%, 93%, 94%, 95%, 96%, 97%, 98%, or 99% identity with SEQ ID NO: 263. In another embodiment, the genetically engineered bacteria comprise the sequence of SEQ ID NO: 263. In yet another embodiment the genetically engineered bacteria comprise a sequence which consists of the sequence of SEQ ID NO: 263.

[1124] In one embodiment, the genetically engineered bacteria comprise a sequence which has at least about 80% identity with SEQ ID NO: 261. In another embodiment, the genetically engineered bacteria comprise a sequence which has at least about 85% identity with SEQ ID NO: 261. In one embodiment, the genetically engineered bacteria comprise a sequence which has at least about 90% identity with SEQ ID NO: 261. In one embodiment, the genetically engineered bacteria comprise a sequence which has at least about 95% identity with SEQ ID NO: 261. In another embodiment, the bcd2 gene has at least about 96%, 97%, 98%, or 99% identity with SEQ ID NO: 261. Accordingly, in one embodiment, the genetically engineered bacteria comprise a sequence which has at least about 80%, 81%, 82%, 83%, 84%, 85%, 86%, 87%, 88%, 89%, 90%, 91%, 92%, 93%, 94%, 95%, 96%, 97%, 98%, or 99% identity with SEQ ID NO: 261. In another embodiment, the genetically engineered bacteria comprise the sequence of SEQ ID NO: 261. In yet another embodiment the genetically engineered bacteria comprise a sequence which consists of the sequence of SEQ ID NO: 261.

[1125] In one embodiment, the genetically engineered bacteria comprise a sequence which has at least about 80% identity with SEQ ID NO: 273. In another embodiment, the genetically engineered bacteria comprise a sequence which has at least about 85% identity with SEQ ID NO: 273. In one embodiment, the genetically engineered bacteria comprise a sequence which has at least about 90% identity with SEQ ID NO: 273. In one embodiment, the genetically engineered bacteria comprise a sequence which has at least about 95% identity with SEQ ID NO: 273. In another embodiment, the bcd2 gene has at least about 96%, 97%, 98%, or 99% identity with SEQ ID NO: 273. Accordingly, in one embodiment, the genetically engineered bacteria comprise a sequence which has at least about 80%, 81%, 82%, 83%, 84%, 85%, 86%, 87%, 88%, 89%, 90%, 91%, 92%, 93%, 94%, 95%, 96%, 97%, 98%, or 99% identity with SEQ ID NO: 273. In another embodiment, the genetically engineered bacteria comprise the sequence of SEQ ID NO: 273. In yet another embodiment the genetically engineered bacteria comprise a sequence which consists of the sequence of SEQ ID NO: 273.

[1126] In one embodiment, the genetically engineered bacteria comprise a sequence which has at least about 80% identity with SEQ ID NO: 256. In another embodiment, the genetically engineered bacteria comprise a sequence which has at least about 85% identity with SEQ ID NO: 256. In one embodiment, the genetically engineered bacteria comprise a sequence which has at least about 90% identity with SEQ ID NO: 256. In one embodiment, the genetically engineered bacteria comprise a sequence which has at least about 95% identity with SEQ ID NO: 256. In another embodiment, the bcd2 gene has at least about 96%, 97%, 98%, or 99% identity with SEQ ID NO: 256. Accordingly, in one embodiment, the genetically engineered bacteria comprise a sequence which has at least about 80%, 81%, 82%, 83%, 84%, 85%, 86%, 87%, 88%, 89%, 90%, 91%, 92%, 93%, 94%, 95%, 96%, 97%, 98%, or 99% identity with SEQ ID NO: 256. In another embodiment, the genetically engineered bacteria comprise the sequence of SEQ ID NO: 256. In yet another embodiment the genetically engineered bacteria comprise a sequence which consists of the sequence of SEQ ID NO: 256.

[1127] In one embodiment, the genetically engineered bacteria comprise a sequence which has at least about 80% identity with SEQ ID NO: 257. In another embodiment, the genetically engineered bacteria comprise a sequence which has at least about 85% identity with SEQ ID NO: 257. In one embodiment, the genetically engineered bacteria comprise a sequence which has at least about 90% identity with SEQ ID NO: 257. In one embodiment, the genetically engineered bacteria comprise a sequence which has at least about 95% identity with SEQ ID NO: 257. In another embodiment, the bcd2 gene has at least about 96%, 97%, 98%, or 99% identity with SEQ ID NO: 257. Accordingly, in one embodiment, the genetically engineered bacteria comprise a sequence which has at least about 80%, 81%, 82%, 83%, 84%, 85%, 86%, 87%, 88%, 89%, 90%, 91%, 92%, 93%, 94%, 95%, 96%, 97%, 98%, or 99% identity with SEQ ID NO: 257. In another embodiment, the genetically engineered bacteria comprise the sequence of SEQ ID NO: 257. In yet another embodiment the genetically engineered bacteria comprise a sequence which consists of the sequence of SEQ ID NO: 257.

### Example 38

### Tryptophan Production in an Engineered Strain of E. coli Nissle

[1128] A number of tryptophan metabolites, either host-derived (such as tryptamine or kynurenine) or intestinal bacteria-derived (such as indole acetate or indole), have been shown to downregulate inflammation and promote gut barrier health, via the activation of the AhR receptor. Other tryptophan metabolites, such as the bacteria-derived indole propionate, have been shown to help restore intestinal barrier integrity, in experimental models of colitis. In this example, the E. coli strain Nissle was engineered to produce tryptophan, the precursor to all those beneficial metabolites.

[1129] First, in order to remove the negative regulation of tryptophan biosynthetic genes mediated by the transcription factor TrpR, the trpR gene was deleted form the E. coli Nissle genome. The tryptophan operon trpEDCBA was amplified by PCR from the E. coli Nissle genomic DNA and cloned in the low-copy plasmid pSC101 under the control of the tet promoter, downstream of the tetR repressor gene. This tet-trpEDCBA plasmid was then transformed into the ΔtrpR mutant to obtain the ΔtrpR, tet-trpEDCBA strain. Subsequently, a feedback resistant version of the aroG gene (aroG^{fbr}) from E. coli Nissle, coding for the enzyme catalyzing the first committing step towards aromatic amino acid production, was synthetized and cloned into the medium copy plasmid p15A, under the control of the tet promoter, downstream of the tetR repressor. This plasmid was transformed into the ΔtrpR, tet-trpEDCBA strain to obtain the ΔtrpR, tet-trpEDCBA, tet-aroG^{fbr} strain. Finally, a feedback resistant version of the tet-trpEBCDA construct (tet-trpE^{fbr}BCDA) was generated from the tet-trpEBCDA. Both the tet-aroG^{fbr} and the tet-trpE^{fbr}BCDA constructs were transformed into the ΔtrpR mutant to obtain the ΔtrpR, tet-trpE^{fbr}DCBA, tet-aroG^{fbr} strain.

[1130] All generated strains were grown in LB overnight with the appropriate antibiotics and subcultured 1/100 in 3 mL LB with antibiotics in culture tubes. After two hours of growth at 37 C at 250 rpm, 100 ng/mL anhydrotetracycline (ATC) was added to the culture to induce expression of the constructs. Two hours after induction, the bacterial cells were pelleted by centrifugation at 4,000 rpm for 5 min and resuspended in 3 mL M9 minimal media. Cells were spun down again at 4,000 rpm for 5 min, resuspended in 3 mL M9 minimal media with 0.5% glucose and placed at 37 C at 250 rpm. 200 uL were collected at 2 h, 4 h and 16 h and tryptophan was quantified by LC-MS/MS in the bacterial supernatant. FIG. 41A shows that tryptophan is being produced and secreted by the ΔtrpR, tet-trpEDCBA, tet-aroG^{fbr} strain. The production of tryptophan is significantly enhanced by expressing the feedback resistant version of trpE.

### Example 39

### Improved Tryptophan by Using a non-PTS Carbon Source and by Deleting the tnaA Gene Encoding Tryptophanase

[1131] One of the precursor molecule to tryptophan in E. coli is phosphoenolpyruvate (PEP). Only 3% of available PEP is normally used to produce aromatic acids (that include tryptophan, phenylalanine and tyrosine). When E. coli is grown using glucose as a sole carbon source, 50% of PEP is used to import glucose into the cell using the phosphotransferase system (PTS). In order to increase tryptophan production, a non-PTS oxidized sugar, glucuronate, was used to test tryptophan secretion by the engineered E. coli Nissle strain ΔrpR, tet-trpe^{fbr}DCBA, tet-aroG^{fbr}. In addition, the tnaA gene, encoding the tryptophanase enzyme, was deleted in the ΔtrpR, tet-trpE^{fbr}DCBA, tet-aroG^{fbr} strain in order to block the conversion of tryptophan into indole to obtain the ΔtrpRΔtnaA, tet-trpE ^{fbr}DCBA, tet-aroG^{fbr} strain.

[1132] the ΔtrpR, tet-trpE^{fbr}DCBA, tet-aroG^{fbr} and ΔtrpRΔtnaA, tet-trpE^{fbr}DCBA, tet-arod^{br} strains were grown in LB overnight with the appropriate antibiotics and subcultured 1/100 in 3 mL LB with antibiotics in culture tubes. After two hours of growth at 37 C at 250 rpm, 100 ng/mL anhydrotetracycline (ATC) was added to the culture to induce expression of the constructs. Two hours after induction, the bacterial cells were pelleted by centrifugation at 4,000rpm for 5min and resuspended in 3 mL M9 minimal media. Cells were spun down again at 4,000 rpm for 5 min, resuspended in 3 mL M9 minimal media with 1% glucose or 1% glucuronate and placed at 37 C at 250 rpm or at 37 C in an anaerobic chamber. 200 uL were collected at 3 h and 16 h and tryptophan was quantified by LC-MS/MS in the bacterial supernatant. FIG. 41B shows that tryptophan production is doubled in aerobic condition when the non-PTS oxidized sugar glucoronate was used. In addition, the deletion of tnaA had a positive effect on tryptophan production at the 3 h time point in both aerobic and anaerobic conditions and at the 16 h time point, only in anaerobic condition.

### Example 40

### Improved Tryptophan Production by Increasing the Rate of Serine Biosynthesis in E. coli Nissle

[1133] The last step in the tryptophan biosynthesis in E. coli consumes one molecule of serine. In this example, we demonstrate that serine availability is a limiting factor for tryptophan production and describe the construction of the tryptophan producing E. coli Nissle strains ΔtrpRΔtnaA, tet-trpE^{fbr}DCBA, tet-aroG^{fbr}serA and ΔtrpRΔtnaA, tet-trpE^{fbr}DCBA, tet-aroG^{fbr}serA^{fbr} strains.

[1134] the ΔtrpRΔtnaA, tet-trpE^{fbr}DCBA, tet-aroG^{fbr} strain was grown in LB overnight with the appropriate antibiotics and subcultured 1/100 in 3 mL LB with antibiotics in culture tubes. After two hours of growth at 37 C at 250 rpm, 100 ng/mL anhydrotetracycline (ATC) was added to the culture to induce expression of the constructs. Two hours after induction, the bacterial cells were pelleted by centrifugation at 4,000 rpm for 5 min and resuspended in 3 mL M9 minimal media. Cells were spun down again at 4,000 rpm for 5 min, resuspended in 3 mL M9 minimal media with 1% glucuronate or 1% glucuronate and 10 mM serine and placed at 37 C an anaerobic chamber. 200 uL were collected at 3 h and 16 h and tryptophan was quantified by LC-MS/MS in the bacterial supernatant. FIG. 41C shows that tryptophan production is improved three-fold by serine addition.

[1135] In order to increase the rate of serine biosynthesis in the ΔtrpRΔtnaA, tet-trpE ^{fbr}DCBA, tet-aroG^{fbr} strain, the serA gene from E. coli Nissle encoding the enzyme catalyzing the first step in the serine biosynthetic pathway was amplified by PCR and cloned into the tet-aroG^{fbr} plasmid by Gibson assembly. The newly generated tet-aroG^{fbr}-serA construct was then transformed into a ΔtrpRΔtnaA, tet-trpE^{fbr}DCBA strain to generate the ΔtrpRΔtnaA, tet-trpE^{fbr}DCBA, tet-aroG^{fbr}-serA strain. The tet-aroG^{fbr}-serA construct was further modified to encode a feedback resistant version of serA (serA^{fbr}). The newly generated tet-aroG^{fbr}-serA^{fbr} construct was used to produce the ΔtrpRΔtnaA, tet-trpE ^{fbr}DCBA, tet-aroG^{fbr}-serA^{fbr} strain, optimized to improve the rate of serine biosynthesis and maximize tryptophan production.

### Example 41

### Comparison of Various Tryptophan Producing Strains

[1136] Compare the rates of tryptophan production in the different strains generated, the following constructs and strains were generated according to methods and sequences described herein (e.g. Example 42), and assayed for tryptophan production in the presence of glucuronate as a carbon source under aerobic conditions. SYN2126 comprises ΔtrpRΔtnaA (ΔtrpRΔtnaA). SYN2323 comprises ΔtrpRΔtnaA and a tetracycline inducible construct for the expression of feedback resistant aroG on a plasmid (AtrpRΔtnaA, tet-aroGfbr). SYN2339 comprises ΔtrpRΔtnaA and a first tetracycline inducible construct for the expression of feedback resistant aroG on a first plasmid and a second tetracycline inducible construct with the genes of the trp operon with a feedback resistant form of trpE on a second plasmid (ΔtrpRΔtnaA, tet-aroGfbr, tet-trpEfbrDCBA). SYN2473 comprises ΔtrpRΔtnaA and a first tetracycline inducible construct for the expression of feedback resistant aroG and SerA on a first plasmid and a second tetracycline inducible construct with the genes of the trp operon with a feedback resistant form of trpE on a second plasmid (ΔtrpRΔtnaA, tet-aroGfbr-serA, tet-trpEfbrDCBA). SYN2476 comprises ΔtrpRΔtnaA and a tetracycline inducible construct with the genes of the trp operon with a feedback resistant form of trpE on a plasmid (AtrpRΔtnaA, tet-trpEfbrDCBA).

[1137] Overnight cultures were diluted 1/100 in 3mL LB plus antibiotics and grown for 2 hours (37 C, 250 rpm). Next, cells were induced with 100 ng/mL ATC for 2 hours (37 C, 250 rpm), spun down, washed with cmL M9, spun down again and resuspended in 3 mL M9+1% glucuronate. Cells were plated for CFU counting. For the assay, the cells were placed of 37 C with shaking at 250 rpm. Supernatants were collected at 1 h, 2 h, 3 h, 4 h 16 h for HPLC analysis for tryptophan. As seen in FIG. 42, results indicate that expressing aroG is not sufficient nor necessary under these conditions to get Trp production and that expressing serA is beneficial for tryptophan production.

### Example 42

### Bacterial Production of Indole Acetic Acid (IAA)

[1138] The ability of a strain comprising tryptophan production circuits and additionally Indole-3-pyruvate decarboxylase from Enterobacter cloacae (IpdC) and Indole-3-acetaldehyde dehydrogenase from Ustilago maydis (Iadl) to produce indole acetic acid (IAA) was tested. The following strains were generated according to methods described herein and tested.

[1139] SYN2126: comprises ΔtrpR and ΔtnaA (ΔtrpRΔtnaA). SYN2339 comprises circuitry for the production of tryptophan; ΔtrpR and ΔtnaA, a first tetracline inducible trpEfbrDCBA construct on a first plasmid(pSC101), and a second tetracycline inducible aroGfbr construct on a second plasmid (ΔtrpRΔtnaA, tetR-Ptet-trpEfbrDCBA (pSC101), tetR-Ptet-aroGfbr (p15A)) (FIG. 36B). SYN2342 comprises the same tryptophan production circuitry as the parental strain SYN2339, and additionally comprises trpDH-ipdC-iadl incorporated at the end of the second construct (ΔtrpRΔtnaA, tetR-Ptet-trpEfbrDCBA (pSC101), tetR-Ptet-aroGfbr-trpDH-ipdC-iad1 (p15A))(FIG. 39B).

[1140] Overnight cultures of the strains were diluted 1/100 in 3 mL LB plus antibiotics and grown for 2 hours (37 C, 250 rpm). Strains were then induced with 100 ng/mL ATC for 2 hours (37 C, 250 rpm). Cells were spun down, and resuspended in 1 mL M9+1% glucuronic acid and CFUs were quantified CFUs using the cellometer. Supernatants were collected at 1 h, 2.5 h and 18 h for LCMS analysis of tryptophan and indole acetic acid as described herein.

[1141] As seen in FIG. 45, SYN2126 produced no tryptophan, SYN2339 produces increasing tryptophan over the time points measured, and SYN2342 containing the additional IAA producing circuitry produces amounts of IAA that are comparable to the amounts of tryptophan produced in its parent SYN2339. No tryptophan is measured, indicating that all tryptophan produced in SYN2342 is efficiently converted into IAA.

### Example 43

### Tryptamine Production Comparing Two Tryptophan Decarboxylases

[1142] The efficacy of two tryptophan decarboxylases (tdc), one from Catharanthus roseus (tdc_{Cr})and a second from Clostridium sporogenes (tdc_{Cs}) in producing tryptamine from tryptophan was tested. The following strains were generated according to methods described herein and tested.

[1143] SYN2339 comprises ΔtrpR and ΔtnaA and a tetracycline inducible trpE^{thr}DCBA construct on a plasmid and another tetracycline inducible construct expressing aroG^{fbr} on a second plasmid (ΔtrpRΔtnaA, tetR-Pₜₑₜ-trpE^{fbr}DCBA (pSC101), tetR-PₜₑₜaroG^{fbr} (p15A)). SYN2339 is used as a control which can produce tryptophan but cannot convert it to tryptamine. SYN2340 comprises ΔtrpR and ΔtnaA and a tetracycline inducible trpE^{thr}DCBA construct on a plasmid and another tetracycline inducible construct expressing aroG^{fbr} tdc_{Cr} on a second plasmid (ΔtrpRΔtnaA, tetR-Pₜₑₜ-trpE^{fbr}DCBA (pSC101), tetR-PₜₑₜaroG^{fbr}-tdc_{Cr} (p15A)). SYN2794 comprises ΔtrpR and ΔtnaA and a tetracycline inducible trpE^{thr}DCBA construct on a plasmid and another tetracycline inducible construct expressing arod^{k} tdc_{Cs} on a second plasmid (ΔtrpRΔtnaA, tetR-Pₜₑₜ-trpE^{fbr}DCBA (pSC101), tetR-Pₜₑₜ-aroG^{fbr}-tdc_{Cs} (p15A)).

[1144] Overnight cultures of the strains were diluted 1/100 in 3 mL LB plus antibiotics and grown for 2 hours (37 C, 250 rpm). Strains were then induced with 100 ng/mL ATC for 2 hours (37 C, 250 rpm). Cells were spun down, and resuspended in 1 mL M9+1% glucuronic acid and CFUs were quantified CFUs using the cellometer. Supernatants were collected at 3 h and 18 h for LCMS analysis of tryptophan and tryptamine, as described herein.

[1145] As seen in FIG. 46, Tdc_{Cs} from Clostridium sporogenes is more efficient than Tdc_{Cr} from Catharanthus roseus in tryptamine production and converts all the tryptophan produced into tryptamine

### Example 44

### Tryptophan and Anthranilic Acid Quantification in Bacterial Supernatant by LC-MS/MS

[1146] Tryptophan and Anthranilic acid stock (10 mg/mL) were prepared in 0.5N HCl, aliquoted in 1.5 mL microcentrifuge tubes (100 μL), and stored at −20° C. Standards (250, 100, 20, 4, 0.8, 0.16, 0.032m/mL) were prepared in water. Samples (10 μL) and standards were mixed with 90 μL of ACN/H20 (60:30, v/v) containing 1 μg/mL of Tryptophan-d5 in the final solution in a V-bottom 96-well plate. The plate was heat-sealed with a AlumASeal foil, mixed well, and centrifuged at 4000 rpm for 5 min. The solution (10 μL) was transferred into a round-bottom 96-well plate 90 uL 0.1% formic acid in water was added to the sample. The plate was again heat-sealed with a ClearASeal sheet and mixed well.

### LC-MS/MS Method

[1147] Tryptophan and Anthranilic acid were measured by liquid chromatography coupled to tandem mass spectrometry (LC-MS/MS) using a Thermo TSQ Quantum Max triple quadrupole mass spectrometer. Table 60., Table 61, and Table 62 provide the summary of the LC-MS/MS method.

TABLE 60
HPLC Method

| | |
|---|---|
| Column | Accucore aQ column, 2.6 μm |
| | (100 × 2.1 mm) |
| Mobile Phase A | 99.9% H2O, 0.1% Formic Acid |
| Mobile Phase B | 99.9% ACN, 0.1% Formic Acid |
| Injection volume | 10 uL |

TABLE 61
HPLC Method:

| | Flow Rate | | |
|---|---|---|---|
| Time (min) | (μL/min) | A % | B % |
| −0.5 | 350 | 100 | 0 |
| 0.5 | 350 | 100 | 0 |
| 1.0 | 350 | 10 | 90 |
| 2.5 | 350 | 10 | 90 |
| 2.51 | 350 | 100 | 10 |

TABLE 62
Tandem Mass Spectrometry

| | |
|---|---|
| Ion Source | HESI-II |
| Polarity | Positive |

SRM transitions

| | |
|---|---|
| Tryptophan | 205.1/118.2 |
| Anthranilic acid | 138.1/92.2 |
| Tryptophan-d5 | 210.1/151.1 |

### Example 44

### Quantification of Tryptamine in Bacterial Supernatant by Liquid Chromatography-Mass Spectrometry (LC-MS)

[1148] Tryptamine acid stock (10 mg/mL) were prepared in 0.5N HCl, aliquoted in 1.5 mL microcentrifuge tubes (100 μL), and stored at −20° C. Standards (250, 100, 20, 4, 0.8, 0.16, 0.032 μm/mL) were prepared. Samples (10 μL) and standards were mixed with 90 μL of ACN/H2O (60:30, v/v) containing 1 μg/mL of tryptamine-d5 in the final solution in a V-bottom 96-well plate. The plate was heat-sealed with a AlumASeal foil, mixed well, and centrifuged at 4000 rpm for 5 min. The solution (10 μL) was transferred into a round-bottom 96-well plate 90 uL 0.1% formic acid in water was added to the sample. The plate was again heat-sealed with a ClearASeal sheet and mixed well.

### LC-MS/MS Method

[1149] Tryptamine was measured by liquid chromatography coupled to tandem mass spectrometry (LC-MS/MS) using a Thermo TSQ Quantum Max triple quadrupole mass spectrometer. Table 63., Table 64, and Table 65 provide the summary of the LC-MS/MS method.

TABLE 63
HPLC Method

| | |
|---|---|
| Column | Accucore aQ column, 2.6 μm |
| | (100 × 2.1 mm) |
| Mobile Phase A | 99.9% H2O, 0.1% Formic Acid |
| Mobile Phase B | 99.9% ACN, 0.1% Formic Acid |
| Injection volume | 10 uL |

TABLE 64
HPLC Method:

| | Flow Rate | | |
|---|---|---|---|
| Time (min) | (μL/min) | A % | B % |
| −0.5 | 350 | 100 | 0 |
| 0.5 | 350 | 100 | 0 |
| 1.0 | 350 | 10 | 90 |
| 2.5 | 350 | 10 | 90 |
| 2.51 | 350 | 100 | 10 |

TABLE 65
Tandem Mass Spectrometry

| | |
|---|---|
| Ion Source | HESI-II |
| Polarity | Positive |

SRM transitions

| | |
|---|---|
| Tryptamine | 161.1/144.1 |

### Example 45

### Quantification of Tryptophan, Indole-3-acetate, Indole-3-lactate, Indole-3-propionate in Bacterial Supernatant by High-pressure Liquid Chromatography (HPLC)

[1150] Samples were thawed on ice and centrifuged at 3,220×g for 5min at 4° C. 80 μL of the supernatant was pipetted, mixed with 20 μL 0.5% formic acid in water, and analyzed by HPLC using a Shimadzu Prominence-I. HPLC conditions used for the quantification of tryptophan, indole-3-acetate, indole-3-lactate and indole-3-propionate are described in Table 66.

TABLE 66
HPLC Analysis
Chromatography

| Calibration standards | 250, 100, 20, 4, 0.8 μg/mL | | |
|---|---|---|---|
| Column | Luna 3 μm C18(2) 100 Å, 100 × 2 mm (catalog# | | |
| | 00D-4251-B0) | | |
| Column Temperature | 40° C. | | |
| Injection Volume | 10 μL | | |
| Autosampler | 10° C. | | |
| Temperature | | | |
| Flow Rate | 0.5 mL/min | | |
| Mobile Phases | A: water, 0.1% FA | | |
| | B: acetonitrile, 0.1% FA | | |
| | Time (min) | % A | % B |
| Gradient | 0 | 90 | 10 |
| | 0.5 | 90 | 10 |
| | 3 | 10 | 90 |
| | 5 | 10 | 90 |
| | 5.01 | 90 | 10 |
| | 7 | (end) | |

Detection: Photodiode Array Detector (PDA)

| Polarity | Positive | |
|---|---|---|
| Start Wavelength | 190 nm | |
| End Wavelength | 800 nm | |
| Spectrum resolution | 512 | |
| Slit Width | 8 nm | |
| Compound | Wavelength (nm) | Retention time (min) |
| Tryptophan | 274 | 1.3 |
| Indole-3-acetate | 274 | 3.5 |
| Indole-lactate | 274 | 3.3 |
| Indole-3-propionate | 274 | 3.7 |

### Example 46

### Generation of Constructs for Overproducing Therapeutic Molecules for Secretion

[1151] To produce strain capable of secreting anti-inflammatory or gut barrier enhancer polypeptides, e.g., GLP2, IL-22, IL-10 (viral or human), several constructs are designed employing different secretion strategies. Various GLP2, IL-22, IL-10 (viral or human) constructs are synthesized, and cloned into vector pBR322 for transformation of E. coli . In some embodiments, the constructs encoding the effector molecules are integrated into the genome. In some embodiments, the constructs encoding the effector molecules are on a plasmid, e.g., a medium copy plasmid. Table 67 lists exemplary polypeptide coding sequences used in the constructs.

TABLE 67
Polypeptide coding sequences

| Description | Sequence | SEQ ID NO |
|---|---|---|
| GLP2 | CATGCTGATGGTTCTTTCTCTGATGAGAT | SEQ ID NO: 285 |
| | GAACACCATTCTTGATAATCTTGCCGCCA | |
| | GGGACTTTATAAACTGGTTGATTCAGACC | |
| | AAAATCACTGAC | |
| GLP2 codon | CATGCTGACGGCTCTTTTTCTGACGAAAT | SEQ ID NO: 286 |
| optimized | GAATACCATCCTGGATAATCTGGCGGCG | |
| | CGTGATTTTATTAATTGGCTGATCCAAAC | |
| | TAAAATTACTGATTAA | |
| FliC20-GLP2 | ATGGCACAAGTCATTAATACCAACAGCC | SEQ ID NO: 287 |
| (F1iC20, start of FliC | TCTCGCTGATCACTCAAAATAATATCAAC | |
| gene preceding | AAGCATGCTGACGGCTCTTTTTCTGACGA | |
| GLP2 sequence | AATGAATACCATCCTGGATAATCTGGCG | |
| underlined) | GCGCGTGATTTTATTAATTGGCTGATCCA | |
| | AACTAAAATTACTGATTAA | |
| GLP2 codon | ATGCATGCTGACGGCTCTTTTTCTGACGA | SEQ ID NO: 288 |
| optimized (e.g., used | AATGAATACCATCCTGGATAATCTGGCG | |
| in fliC construct) | GCGCGTGATTTTATTAATTGGCTGATCCA | |
| | AACTAAAATTACTGATTAA | |
| vIL10 codon | ATGGGTACTGACCAATGTGATAATTTCCC | SEQ ID NO: 289 |
| optimized (e.g., used | ACAAATGCTGCGTGATTTGCGCGACGCTT | |
| in fliC construct) | TCTCGCGTGTGAAAACTTTTTTTCAGACT | |
| | AAAGATGAGGTGGATAATCTGCTGCTGA | |
| | AAGAGAGCCTGTTGGAAGATTTTAAAGG | |
| | CTACTTGGGCTGTCAAGCGCTGTCGGAG | |
| | ATGATTCAATTTTATCTGGAAGAGGTGAT | |
| | GCCGCAAGCTGAGAACCAAGATCCGGAA | |
| | GCGAAAGATCACGTGAATTCGCTGGGCG | |
| | AGAATCTGAAAACTCTGCGTCTGCGTCTG | |
| | CGTCGTTGTCACCGTTTTTTGCCGTGCGA | |
| | AAACAAAAGTAAAGCTGTTGAGCAAATT | |
| | AAAAACGCTTTTAACAAACTGCAGGAAA | |
| | AAGGTATCTATAAAGCGATGAGCGAATT | |
| | TGATATTTTTATTAATTATATTGAAGCTT | |
| | ATATGACTATTAAAGCTCGCTAA | |
| vIL10 | GGTACAGACCAATGTGACAATTTTCCCCA | SEQ ID NO: 290 |
| | AATGTTGAGGGACCTAAGAGATGCCTTC | |
| | AGTCGTGTTAAAACCTTTTTCCAGACAAA | |
| | GGACGAGGTAGATAACCTTTTGCTCAAG | |
| | GAGTCTCTGCTAGAGGACTTTAAGGGCT | |
| | ACCTTGGATGCCAGGCCCTGTCAGAAAT | |
| | GATCCAATTCTACCTGGAGGAAGTCATG | |
| | CCACAGGCTGAAAACCAGGACCCTGAAG | |
| | CCAAAGACCATGTCAATTCTTTGGGTGAA | |
| | AATCTAAAGACCCTACGGCTCCGCCTGC | |
| | GCCGTTGCCACAGGTTCCTGCCGTGTGAG | |
| | AACAAGAGTAAAGCTGTGGAACAGATAA | |
| | AAAATGCCTTTAACAAGCTGCAGGAAAA | |
| | AGGAATTTACAAAGCCATGAGTGAATTT | |
| | GACATTTTTATTAACTACATAGAAGCATA | |
| | CATGACAATTAAAGCCAGG | |
| IL-22 codon | GCACCGATCTCTTCCCACTGTCGCTTAGA | SEQ ID NO: 291 |
| optimized (e.g., use | TAAATCGAATTTTCAACAACCTTATATTA | |
| with diffusible outer | CGAATCGTACGTTTATGCTGGCTAAAGA | |
| membrane construct) | AGCGTCATTAGCTGATAACAACACTGAT | |
| | GTTCGCCTGATTGGTGAGAAATTGTTTCA | |
| | CGGTGTGTCTATGTCAGAACGTTGCTACC | |
| | TGATGAAACAAGTTCTGAATTTCACCCTG | |
| | GAAGAAGTGTTGTTTCCGCAATCTGACCG | |
| | CTTTCAACCGTATATGCAAGAGGTTGTGC | |
| | CGTTTCTGGCGCGCCTGAGTAATCGCCTG | |
| | AGCACTTGTCATATTGAGGGCGACGACC | |
| | TGCATATTCAACGAAATGTTCAAAAATTG | |
| | AAAGATACGGTGAAGAAACTGGGTGAAA | |
| | GTGGTGAAATCAAAGCGATTGGTGAGCT | |
| | GGATCTGCTGTTTATGTCATTGCGCAATG | |
| | CGTGCATTTAA | |
| IL-22 codon | ATGGCACCGATCTCTTCCCACTGTCGCTT | SEQ ID NO: 292 |
| optimized (e.g., used | AGATAAATCGAATTTTCAACAACCTTATA | |
| in fliC construct) | TTACGAATCGTACGTTTATGCTGGCTAAA | |
| | GAAGCGTCATTAGCTGATAACAACACTG | |
| | ATGTTCGCCTGATTGGTGAGAAATTGTTT | |
| | CACGGTGTGTCTATGTCAGAACGTTGCTA | |
| | CCTGATGAAACAAGTTCTGAATTTCACCC | |
| | TGGAAGAAGTGTTGTTTCCGCAATCTGAC | |
| | CGCTTTCAACCGTATATGCAAGAGGTTGT | |
| | GCCGTTTCTGGCGCGCCTGAGTAATCGCC | |
| | TGAGCACTTGTCATATTGAGGGCGACGA | |
| | CCTGCATATTCAACGAAATGTTCAAAAAT | |
| | TGAAAGATACGGTGAAGAAACTGGGTGA | |
| | AAGTGGTGAAATCAAAGCGATTGGTGAG | |
| | CTGGATCTGCTGTTTATGTCATTGCGCAA | |
| | TGCGTGCATTTAA | |
| hIL-10 codon | TCGCCAGGTCAAGGAACGCAGTCAGAGA | SEQ ID NO: 293 |
| optimized | ATTCATGCACTCACTTTCCGGGCAATCTG | |
| | CCGAATATGCTGCGCGATCTGCGAGATG | |
| | CATTCTCTCGCGTGAAAACGTTCTTTCAA | |
| | ATGAAAGATCAACTGGATAATCTGCTGC | |
| | TGAAGGAGTCGTTGTTGGAGGATTTTAA | |
| | GGGGTATCTGGGTTGTCAAGCACTGTCTG | |
| | AAATGATTCAATTTTACTTGGAGGAAGTT | |
| | ATGCCGCAAGCGGAAAACCAAGATCCGG | |
| | ATATTAAGGCGCACGTGAACTCACTGGG | |
| | CGAAAACCTGAAAACTTTGCGCCTGCGT | |
| | CTGAGACGATGTCACCGATTCCTGCCGTG | |
| | TGAAAACAAGTCAAAGGCGGTTGAGCAA | |
| | GTTAAGAATGCTTTCAATAAGCTGCAAG | |
| | AAAAGGGCATCTATAAAGCGATGTCTGA | |
| | ATTTGATATCTTTATAAACTACATAGAAG | |
| | CTTATATGACTATGAAGATTCGAAATTAA | |
| Monomerized hIL- | TCGCCAGGTCAAGGAACGCAGTCAGAGA | SEQ ID NO: 294 |
| 10 (codon opt) | ATTCATGCACTCACTTTCCGGGCAATCTG | |
| | CCGAATATGCTGCGCGATCTGCGAGATG | |
| | CATTCTCTCGCGTGAAAACGTTCTTTCAA | |
| | ATGAAAGATCAACTGGATAATCTGCTGC | |
| | TGAAGGAGTCGTTGTTGGAGGATTTTAA | |
| | GGGGTATCTGGGTTGTCAAGCACTGTCTG | |
| | AAATGATTCAATTTTACTTGGAGGAAGTT | |
| | ATGCCGCAAGCGGAAAACCAAGATCCGG | |
| | ATATTAAGGCGCACGTGAACTCACTGGG | |
| | CGAAAACCTGAAAACTTTGCGCCTGCGT | |
| | CTGAGACGATGTCACCGATTCCTGCCGTG | |
| | TGAAAACGGAGGAGGAAGTGGTGGTAAG | |
| | TCAAAGGCGGTTGAGCAAGTTAAGAATG | |
| | CTTTCAATAAGCTGCAAGAAAAGGGCAT | |
| | CTATAAAGCGATGTCTGAATTTGATATCT | |
| | TTATAAACTACATAGAAGCTTATATGACT | |
| | ATGAAGATTCGAAATTAA | |

[1152] In some embodiments, genetically engineered bacteria comprise a nucleic acid sequence that is at least about 80%, at least about 85%, at least about 90%, at least about 95%, or at least about 99% homologous to the DNA sequence of SEQ ID NO: 285, SEQ ID NO: 286, SEQ ID NO: 287, SEQ ID NO: 288, SEQ ID NO: 289, SEQ ID NO: 290, SEQ ID NO: 291, SEQ ID NO: 292, SEQ ID NO: 293, or SEQ ID NO: 294 or a functional fragment thereof.

[1153] Table 68 lists exemplary secretion tags, which can be added at the N-terminus when the diffusible outer membrane (DOM) method or the fliC method is used.

TABLE 68
Secretion Tags and FliC components

| Sequence Name | Sequence | SEQ ID NO |
|---|---|---|
| fliC-FliC20 (e.g., used in GLP2 | tgacggcgattgagccgacgggtggaaaccc | SEQ ID NO: 295 |
| construct) | aaaacgtaatcaacGTGGGTACTC | |
| FliC20: start of the fliC gene | CTTAAATTGGGTTCGAATGG | |
| which (in some constructs) | ACCatggcacaagtcattaataccaacagc | |
| precedes the effector polypeptide | ctctcgctgatcactcaaaataatatcaacaag | |
| sequence, see e.g., FIG. 30B and | | |
| FIG. 30C shown in italics | | |
| fliC: native fliC UTR in bold, | | |
| optimized RBS underlined | | |
| fliC-RBS (e.g., used in IL22 | tgacggcgattgagccgacgggtggaaaccc | SEQ ID NO: 296 |
| construct) | aaaacgtaatcaactacgaacacttacagga | |
| fliC: native fliC UTR in bold, | ggtaccca | |
| optimized RBS underlined | | |
| fliC-RBS (e.g., used in GLP2 | tgacggcgattgagccgacgggtggaaaccc | SEQ ID NO: 297 |
| construct) | aaaacgtaatcaacaagtataaactctggga | |
| fliC: native fliC UTR in bold, | ggttccta | |
| optimized RBS underlined | | |
| fliC-RBS (e.g., used in vIL10 | tgacggcgattgagccgacgggtggaaaccc | SEQ ID NO: 298 |
| construct) | aaaacgtaatcaactcaaatcccttaataagg | |
| fliC: native fliC UTR in bold, | aggtaaa | |
| optimized RBS underlined | | |
| RBS-phoA | Ctctagaaataattttgtttaactttaagaaggaga | SEQ ID NO: 299 |
| RBS: underlined | tatacatatgaaacaaagcactattgcactggca | |
| | ctcttaccgttactgtttacccctgtgacaaaagc | |
| | g | |
| phoA | atgaaacaaagcactattgcactggcactcttac | SEQ ID NO: 300 |
| | cgttactgtttacccctgtgacaaaagcg | |
| RBS-ompF | Ctctagaaataattttgtttaactttaagaaggaga | SEQ ID NO: 301 |
| RBS: underlined | tatacatatgatgaagcgcaatattctggcagtga | |
| | tcgtccctgctctgttagtagcaggtactgcaaac | |
| | gct | |
| ompF | atgatgaagcgcaatattctggcagtgatcgtcc | SEQ ID NO: 302 |
| | ctgctctgttagtagcaggtactgcaaacgct | |
| RBS-cvaC | Ctctagaaataattttgtttaactttaagaaggaga | SEQ ID NO: 303 |
| RBS: underlined | tatacatATGAGAACTCTGACTCT | |
| | AAATGAATTAGATTCTGTTTC | |
| | TGGTGGT | |
| cvaC | ATGAGAACTCTGACTCTAAAT | SEQ ID NO: 304 |
| | GAATTAGATTCTGTTTCTGGT | |
| | GGT | |
| RBS-phoA (Optimized, e.g., | GACGCCAGAGAGTTAAGGGG | SEQ ID NO: 305 |
| used in IL10 construct) | GTTAAATGAAACAATCGACC | |
| RBS: underlined | ATCGCATTGGCGCTGCTTCCT | |
| | CTATTGTTCACACCGGTGACA | |
| | AAGGCA | |
| Optimized phoA | ATGAAACAATCGACCATCGC | SEQ ID NO: 306 |
| | ATTGGCGCTGCTTCCTCTATT | |
| | GTTCACACCGGTGACAAAGG | |
| | CA | |
| RBS-TorA | ctctagaaataattttgtttaactttaagaaggagat | SEQ ID NO: 307 |
| RBS: underlined | atacatATGAACAATAACGATCT | |
| | CTTTCAGGCATCACGTCGGCG | |
| | TTTTCTGGCACAACTCGGCGG | |
| | CTTAACCGTCGCCGGGATGCT | |
| | GGGGCCGTCATTGTTAACGCC | |
| | GCGACGTGCGACTGCG | |
| TorA | ATGAACAATAACGATCTCTTT | SEQ ID NO: 308 |
| | CAGGCATCACGTCGGCGTTTT | |
| | CTGGCACAACTCGGCGGCTTA | |
| | ACCGTCGCCGGGATGCTGGG | |
| | GCCGTCATTGTTAACGCCGCG | |
| | ACGTGCGACTGCG | |
| RBS-TorA alternate | CCCACATTCGAGGTACTAAatg | SEQ ID NO: 309 |
| | aacaataacgatctctttcaggcatcacgtcggc | |
| | gttttctggcacaactcggcggcttaaccgtcgc | |
| | cgggatgctggggacgtcattgttaacgccgcg | |
| | ccgtgcgactgcggcgcaagcggcg | |
| TorA (alternate) | atgaacaataacgatctctttcaggcatcacgtcg | SEQ ID NO: 310 |
| | gcgttttctggcacaactcggcggcttaaccgtc | |
| | gccgggatgctggggacgtcattgttaacgccg | |
| | cgccgtgcgactgcggcgcaagcggcg | |
| RBS-fdnG | ACCCTATTACACACCTAAGGA | SEQ ID NO: 311 |
| | GGCCAAATACatggacgtcagtcgcag | |
| | acaattttttaaaatctgcgcgggcggtatggcg | |
| | ggaacaacagtagcagcattgggctttgccccg | |
| | aagcaagcactggct | |
| fdnG | atggacgtcagtcgcagacaattttttaaaatctg | SEQ ID NO: 312 |
| | cgcgggcggtatggcgggaacaacagtagca | |
| | gcattgggctttgccccgaagcaagcactggct | |
| RBS-dmsA | TACGCAAAAAACATAATTTAA | SEQ ID NO: 313 |
| | GAGAGGATAAACatgaaaacgaaaa | |
| | tccctgatgcggtattggctgctgaggtgagtcg | |
| | ccgtggtttggtaaaaacgacagcgatcggcgg | |
| | cctggcaatggccagcagcgcattaacattacct | |
| | tttagtcggattgcgcacgct | |
| dmsA | atgaaaacgaaaatccctgatgcggtattggctg | SEQ ID NO: 314 |
| | ctgaggtgagtcgccgtggtttggtaaaaacgac | |
| | agcgatcggcggcctggcaatggccagcagcg | |
| | cattaacattaccttttagtcggattgcgcacgct | |

[1154] In some embodiments, genetically engineered bacteria comprise a nucleic acid sequence that is at least about 80%, at least about 85%, at least about 90%, at least about 95%, or at least about 99% homologous to the DNA sequence of SEQ ID NO: 295, SEQ ID NO: 296, SEQ ID NO: 297, SEQ ID NO: 298, SEQ ID NO: 299, SEQ ID NO: 300, SEQ ID NO: 301, SEQ ID NO: 302, SEQ ID NO: 303, SEQ ID NO: 304, SEQ ID NO: 305, SEQ ID NO: 306, SEQ ID NO: 307, SEQ ID NO: 308, SEQ ID NO: 309, SEQ ID NO: 310, SEQ ID NO: 311, SEQ ID NO: 312, and SEQ ID NO: 313. Table 69 lists exemplary promoter sequences and miscellaneous construct sequences.

TABLE 69
Promoter Sequences and Various Construct Sequences

| | | SEQ ID |
|---|---|---|
| Description | Sequence | NO |
| TetR/TetA | gaattcgttaagacccactttcacatttaagttgtttttctaatccgcatatgatcaattcaag | SEQ ID |
| Promoter | gccgaataagaaggctggctctgcaccttggtgatcaaataattcgatagcttgtcgtaata | NO: 315 |
| | atggcggcatactatcagtagtaggtgtttccctttcttctttagcgacttgatgacttgatc | |
| | ttccaatacgcaacctaaagtaaaatgccccacagcgctgagtgcatataatgcattctct | |
| | agtgaaaaaccttgttggcataaaaaggctaattgattttcgagagtttcatactgtttttct | |
| | gtaggccgtgtacctaaatgtacttttgctccatcgcgatgacttagtaaagcacatctaaa | |
| | acttttagcgttattacgtaaaaaatcttgccagctttccccttctaaagggcaaaagtgag | |
| | tatggtgcctatctaacatctcaatggctaaggcgtcgagcaaagcccgcttattttttacat | |
| | gccaatacaatgtaggctgctctacacctagcttctgggcgagtttacgggttgttaaacctt | |
| | cgattccgacctcattaagcagctctaatgcgctgttaatcactttacttttatctaatctaga | |
| | catcattaattcctaatttttgttgacactctatcattgatagagttattttaccactccctatc | |
| | agtgatagagaaaagtgaa | |
| fliC Promoter | agcgggaataaggggcagagaaaagagtatttcgtcgactaacaaaaaatggctgtttgt | SEQ ID |
| | gaaaaaaattctaaaggttgttttacgacagacgataacagggt | NO: 316 |
| FnrS | ggtaccAGTTGTTCTTATTGGTGGTGTTGCTTTATGGTTGCATCGTAGT | SEQ ID |
| Promoter | AAATGGTTGTAACAAAAGCAATTTTTCCGGCTGTCTGTATACAAAAA | NO: 317 |
| | CGCCGCAAAGTTTGAGCGAAGTCAATAAACTCTCTACCCATTCAGGG | |
| | CAATATCTCTCTTggatcc | |
| DOM | cacatttccccgaaaagtgccgatggccccccgatggtagtgtggcccatgcgagagtagg | SEQ ID |
| Construct | gaactgccaggcatcaaataaaacgaaaggctcagtcgaaagactgggcctttcgttttat | NO: 318 |
| Terminator | ctgttgtttgtcggtgaacgctctcctgagtaggacaaatccgccgggagcggatttgaacg | |
| | ttgcgaagcaacggcccggagggtggcgggcaggacgcccgccataaactgccaggcat | |
| | caaattaagcagaaggccatcctgacggatggcctttttgcgtggccagtgccaagcttgc | |
| | atgcagattgcagcattacacgtcttgagcgattgtgtaggctggagctgcttc | |
| FRT Site | gaagttcctatactttctagagaataggaacttcggaataggaacttc | SEQ ID |
| | | NO: 319 |
| Kanamycin | aagatcccctcacgctgccgcaagcactcagggcgcaagggctgctaaaggaagcggaa | SEQ ID |
| Resistance | cacgtagaaagccagtccgcagaaacggtgctgaccccggatgaatgtcagctactgggc | NO: 320 |
| Cassette (for | tatctggacaagggaaaacgcaagcgcaaagagaaagcaggtagcttgcagtgggctta | |
| integration | catggcgatagctagactgggcggttttatggacagcaagcgaaccggaattgccagctg | |
| in between | gggcgccctctggtaaggttgggaagccctgcaaagtaaactggatggctttcttgccgcc | |
| FRT sites) | aaggatctgatggcgcaggggatcaagatctgatcaagagacaggatgaggatcgtttcg | |
| | catgattgaacaagatggattgcacgcaggttctccggccgcttgggtggagaggctattc | |
| | ggctatgactgggcacaacagacaatcggctgctctgatgccgccgtgttccggctgtcag | |
| | cgcaggggcgcccggttctttttgtcaagaccgacctgtccggtgccctgaatgaactgcag | |
| | gacgaggcagcgcggctatcgtggctggccacgacgggcgttccttgcgcagctgtgctcg | |
| | acgttgtcactgaagcgggaagggactggctgctattgggcgaagtgccggggcaggatc | |
| | tcctgtcatctcaccttgctcctgccgagaaagtatccatcatggctgatgcaatgcggcgg | |
| | ctgcatacgcttgatccggctacctgcccattcgaccaccaagcgaaacatcgcatcgagc | |
| | gagcacgtactcggatggaagccggtcttgtcgatcaggatgatctggacgaagagcatc | |
| | aggggctcgcgccagccgaactgttcgccaggctcaaggcgcgcatgcccgacggcgag | |
| | gatctcgtcgtgacccatggcgatgcctgcttgccgaatatcatggtggaaaatggccgctt | |
| | ttctggattcatcgactgtggccggctgggtgtggcggaccgctatcaggacatagcgttgg | |
| | ctacccgtgatattgctgaagagcttggcggcgaatgggctgaccgcttcctcgtgctttac | |
| | ggtatcgccgctcccgattcgcagcgcatcgccttctatcgccttcttgacgagttcttctga | |
| | gcgggactctggggttcgaaatgaccgaccaagcgacgcccaacctgccatcacgagatt | |
| | tcgattccaccgccgccttctatgaaaggttgggcttcggaatcgttttccgggacgccggc | |
| | tggatgatcctccagcgcggggatctcatgctggagttcttcgcccaccccagcttcaaaag | |
| | cgctct | |

[1155] In some embodiments, genetically engineered bacteria comprise a nucleic acid sequence that is at least about 80%, at least about 85%, at least about 90%, at least about 95%, or at least about 99% homologous to the DNA sequence of SEQ ID NO: 315, SEQ ID NO: 316, SEQ ID NO: 317, SEQ ID NO: 318, SEQ ID NO: 319, and SEQ ID NO: 320. Table 70 Lists exemplary secretion constructs.

TABLE 70
Non-limiting Examples of Secretion Constructs

| Description | Sequence | SEQ ID NO: |
|---|---|---|
| FliC20-glp2; a human | cgttccttgtagggcgtcatagcgttcgacggcattaagtaacccaatgcc | SEQ ID NO: |
| GLP2 construct | gcccgcctgtagcagatcgtcaagttccacgctcgcgggcagtcgaacct | 321 |
| inserted into the FliC | gcaggcgcaatgcttcgtgacgcaccagcgggacataacgctgccacag | |
| locus, under the | cgagtgtttatccattacaccttcagcggtatagagtgaattcacgataaaca | |
| control of the native | gccctgcgttatatgagttatcggcatgattatccgtttctgcagggtattaat | |
| FliC promoter | cggacgattagtgggtgaaatgaggggttatttgggggttaccggtaaatt | |
| | gcgggcagaaaaaaccccgccgttggcggggaagcacgttgctggcaa | |
| | attaccattcatgttgccggatgcggcgtaaacgccttatccggcctacaaa | |
| | aatgtgcaaattcaataaattgcaattccccttgtaggcctgataagcgcag | |
| | cgcatcaggcaatttggcgttgccgtcagtctcagttaatcaggttacggcg | |
| | attaatcagtaattttagtttggatcagccaattaataaaatcacgcgccgcc | |
| | agattatccaggatggtattcatttcgtcagaaaaagagccgtcagcATG | |
| | cattaggaacctcccagagtttatacttgttgattacgttttgggtttccaccc | |
| | gtcggctcaatcgccgtcaaccctgttatcgtctgtcgtaaaacaacctttag | |
| | aatttttttcacaaacagccattttttgttagtcgacgaaatactcttttctctgc | |
| | cccttattcccgctattaaaaaaaacaattaaacgtaaactttgcgcaattca | |
| | ggccgataaccccggtattcgttttacgtgtcgaaagataaaCGAAGT | |
| | TCCTATACTTTCTAGAGAATAGGAACTTCGG | |
| | AATAGGAACTTCATTTctcgttcgctgccacctaagaatact | |
| | ctacggtcacatacAAATGGCGCGCCTTACGCCCCGC | |
| | CCTGCCACTCATCGCAGTACTGTTGTATTCAT | |
| | TAAGCATCTGCCGACATGGAAGCCATCACAA | |
| | ACGGCATGATGAACCTGAATCGCCAGCGGCA | |
| | TCAGCACCTTGTCGCCTTGCGTATAATATTTG | |
| | CCCATGGTGAAAACGGGGGCGAAGAAGTTGT | |
| | CCATATTGGCCACGTTTAAATCAAAACTGGT | |
| | GAAACTCACCCAGGGATTGGCTGAGACGAAA | |
| | AACATATTCTCAATAAACCCTTTAGGGAAAT | |
| | AGGCCAGGTTTTCACCGTAACACGCCACATC | |
| | TTGCGAATATATGTGTAGAAACTGCCGGAAA | |
| | TCGTCGTGGTATTCACTCCAGAGCGATGAAA | |
| | ACGTTTCAGTTTGCTCATGGAAAACGGTGTA | |
| | ACAAGGGTGAACACTATCCCATATCACCAGC | |
| | TCACCGTCTTTCATTGCCATACGTAATTCCGG | |
| | ATGAGCATTCATCAGGCGGGCAAGAATGTGA | |
| | ATAAAGGCCGGATAAAACTTGTGCTTATTTTT | |
| | CTTTACGGTCTTTAAAAAGGCCGTAATATCC | |
| | AGCTGAACGGTCTGGTTATAGGTACATTGAG | |
| | CAACTGACTGAAATGCCTCAAAATGTTCTTT | |
| | ACGATGCCATTGGGATATATCAACGGTGGTA | |
| | TATCCAGTGATTTTTTTCTCCATTTTAGCTTCC | |
| | TTAGCTCCTGAAAATCTCGACAACTCAAAAA | |
| | ATACGCCCGGTAGTGATCTTATTTCATTATGG | |
| | TGAAAGTTGGAACCTCTTACGTGCCGATCAA | |
| | CGTCTCATTTTCGCCAAAAGTTGGCCCAGGG | |
| | CTTCCCGGTATCAACAGGGACACCAGGATTT | |
| | ATTTATTCTGCGAAGTGATCTTCCGTCACAGG | |
| | TAGGCGCGCCGAAGTTCCTATACTTTCTAGA | |
| | GAATAGGAACTTCGGAATAGGAACTctcaccgcc | |
| | gcgcaaaaagcgacgctaacccctatttcaaatcagcaatcgtcgtttacc | |
| | gctaaacttagcgcctacggtacgctgaaaagcgcgctgacgactttcca | |
| | gaccgccaatactgcattgtctaaagccgatcttttttccgctaccagcacc | |
| | accagcagcaccaccgcgttcagtgccaccaccgcgggtaatgccatcg | |
| | ccgggaaatacaccatcagcgtcacccatctggcgcaggcgcaaaccct | |
| | gacaacgcgcaccaccagagacgatacgaaaacggcgatcgccacca | |
| | gcgacagcaaactcaccattcaacaaggcggcgacaaagatccgatttcc | |
| | attgatatcagcgcggctaactcgtctttaagcgggatccgtgatgccatca | |
| | acaacgcaaaagcaggcgtaagcgcaagcatcattaacgtgggtaacgg | |
| | tgaatatcgtctgtcagtcacatcaaatgacaccggcct | |
| FliC20 with optimized | attaatcagtaattttagtttggatcagccaattaataaaatcacgcgccgcc | SEQ ID NO: |
| RBS-GLP2 and UTR- | agattatccaggatggtattcatttcgtcagaaaaagagccgtcagcATG | 322 |
| FliC | cattaggaacctcccagagtttatacttgttgattacgttttgggtttccaccc | |
| | gtcggctcaatcgccgtca | |
| human GLP2 | cgttccttgtagggcgtcatagcgttcgacggcattaagtaacccaatgcc | SEQ ID NO: |
| construct,, including | gcccgcctgtagcagatcgtcaagttccacgctcgcgggcagtcgaacct | 323 |
| the N terminal 20 | gcaggcgcaatgcttcgtgacgcaccagcgggacataacgctgccacag | |
| amino acids of FliC | cgagtgtttatccattacaccttcagcggtatagagtgaattcacgataaaca | |
| (reverse orientation), | gccctgcgttatatgagttatcggcatgattatccgtttctgcagggtattaat | |
| inserted into the FliC | cggacgattagtgggtgaaatgaggggttatttgggggttaccggtaaatt | |
| locus under the control | gcgggcagaaaaaaccccgccgttggcggggaagcacgttgctggcaa | |
| of a tet inducible | attaccattcatgttgccggatgcggcgtaaacgccttatccggcctacaaa | |
| promoter, with TetR | aatgtgcaaattcaataaattgcaattccccttgtaggcctgataagcgcag | |
| and chloramphenicol | cgcatcaggcaatttggcgttgccgtcagtctcagttaatcaggttacggcg | |
| resistance. | attaatcagtaattttagtttggatcagccaattaataaaatcacgcgccgcc | |
| | agattatccaggatggtattcatttcgtcagaaaaagagccgtcagcATG | |
| | cttgttgatattattttgagtgatcagcgagaggctgttggtattaatgacttgt | |
| | gccatGGTCCATTCGAACCCAATTTAAGGAGTA | |
| | CCCACgttgattacgttttgggtttccacccgtcggctcaatcgccgtca | |
| | ttctctatcactgatagggagtggtaaaataactctatcaatgatagagtgtc | |
| | aacaaaaattaggaattaatgatgtctagattagataaaagtaaagtgattaa | |
| | cagcgcattagagctgcttaatgaggtcggaatcgaaggtttaacaacccg | |
| | taaactcgcccagaagctaggtgtagagcagcctacattgtattggcatgt | |
| | aaaaaataagcgggctttgctcgacgccttagccattgagatgttagatag | |
| | gcaccatactcacttttgccctttagaaggggaaagctggcaagattttttac | |
| | gtaataacgctaaaagttttagatgtgctttactaagtcatcgcgatggagca | |
| | aaagtacatttaggtacacggcctacagaaaaacagtatgaaactctcgaa | |
| | aatcaattagccatttatgccaacaaggtttttcactagagaatgcattatatg | |
| | cactcagcgctgtggggcattttactttaggttgcgtattggaagatcaaga | |
| | gcatcaagtcgctaaagaagaaagggaaacacctactactgatagtatgc | |
| | cgccattattacgacaagctatcgaattatttgatcaccaaggtgcagagcc | |
| | agccttcttattcggccttgaattgatcatatgcggattagaaaaacaactta | |
| | aatgtgaaagtgggtcttaagaattatttcacaaacagccattattgttagtc | |
| | gacgaaatactcttttctctgccccttattcccgctattaaaaaaaacaattaa | |
| | acgtaaactttgcgcaattcaggccgataaccccggtattcgttttacgtgtc | |
| | gaaagataaaCGAAGTTCCTATACTTTCTAGAGAA | |
| | TAGGAACTTCGGAATAGGAACTTCATTTctcgtt | |
| | cgctgccacctaagaatactctacggtcacatacAAATGGCGCG | |
| | CCTTACGCCCCGCCCTGCCACTCATCGCAGTA | |
| | CTGTTGTATTCATTAAGCATCTGCCGACATGG | |
| | AAGCCATCACAAACGGCATGATGAACCTGAA | |
| | TCGCCAGCGGCATCAGCACCTTGTCGCCTTG | |
| | CGTATAATATTTGCCCATGGTGAAAACGGGG | |
| | GCGAAGAAGTTGTCCATATTGGCCACGTTTA | |
| | AATCAAAACTGGTGAAACTCACCCAGGGATT | |
| | GGCTGAGACGAAAAACATATTCTCAATAAAC | |
| | CCTTTAGGGAAATAGGCCAGGTTTTCACCGT | |
| | AACACGCCACATCTTGCGAATATATGTGTAG | |
| | AAACTGCCGGAAATCGTCGTGGTATTCACTC | |
| | CAGAGCGATGAAAACGTTTCAGTTTGCTCAT | |
| | GGAAAACGGTGTAACAAGGGTGAACACTATC | |
| | CCATATCACCAGCTCACCGTCTTTCATTGCCA | |
| | TACGTAATTCCGGATGAGCATTCATCAGGCG | |
| | GGCAAGAATGTGAATAAAGGCCGGATAAAA | |
| | CTTGTGCTTATTTTTCTTTACGGTCTTTAAAA | |
| | AGGCCGTAATATCCAGCTGAACGGTCTGGTT | |
| | ATAGGTACATTGAGCAACTGACTGAAATGCC | |
| | TCAAAATGTTCTTTACGATGCCATTGGGATAT | |
| | ATCAACGGTGGTATATCCAGTGATTTTTTTCT | |
| | CCATTTTAGCTTCCTTAGCTCCTGAAAATCTC | |
| | GACAACTCAAAAAATACGCCCGGTAGTGATC | |
| | TTATTTCATTATGGTGAAAGTTGGAACCTCTT | |
| | ACGTGCCGATCAACGTCTCATTTTCGCCAAA | |
| | AGTTGGCCCAGGGCTTCCCGGTATCAACAGG | |
| | GACACCAGGATTTATTTATTCTGCGAAGTGA | |
| | TCTTCCGTCACAGGTAGGCGCGCCGAAGTTC | |
| | CTATACTTTCTAGAGAATAGGAACTTCGGAA | |
| | TAGGAACTctcaccgccgcgcaaaaagcgacgctaacccctattt | |
| | caaatcagcaatcgtcgtttaccgctaaacttagcgcctacggtacgctga | |
| | aaagcgcgctgacgactttccagaccgccaatactgcattgtctaaagccg | |
| | atcttttttccgctaccagcaccaccagcagcaccaccgcgttcagtgcca | |
| | ccaccgcgggtaatgccatcgccgggaaatacaccatcagcgtcaccca | |
| | tctggcgcaggcgcaaaccctgacaacgcgcaccaccagagacgatac | |
| | gaaaacggcgatcgccaccagcgacagcaaactcaccattcaacaagg | |
| | cggcgacaaagatccgatttccattgatatcagcgcggctaactcgtcttta | |
| | agcgggatccgtgatgccatcaacaacgcaaaagcaggcgtaagcgca | |
| | agcatcattaacgtgggtaacggtgaatatcgtctgtcagtcacatcaaatg | |
| | acaccggcct | |
| human GLP2 | ttaatcagtaattttagtttggatcagccaattaataaaatcacgcgccgcca | SEQ ID NO: |
| construct,, including | gattatccaggatggtattcatttcgtcagaaaaagagccgtcagcATGc | 324 |
| the N terminal 20 | ttgttgatattattttgagtgatcagcgagaggctgttggtattaatgacttgtg | |
| amino acids of FliC | ccat | |
| (reverse orientation) | | |
| human GLP2 | ttaagacccactttcacatttaagttgatttctaatccgcatatgatcaattcaa | SEQ ID NO: |
| construct with a N | ggccgaataagaaggctggctctgcaccttggtgatcaaataattcgatag | 325 |
| terminal OmpF | cttgtcgtaataatggcggcatactatcagtagtaggtgtttccctttcttcttt | |
| secretion tag (sec- | agcgacttgatgctcttgatcttccaatacgcaacctaaagtaaaatgcccc | |
| dependent secretion | acagcgctgagtgcatataatgcattctctagtgaaaaaccttgttggcata | |
| system) under the | aaaaggctaattgattttcgagagtttcatactgatttctgtaggccgtgtacc | |
| control of a tet | taaatgtacttttgctccatcgcgatgacttagtaaagcacatctaaaactttt | |
| inducible promoter, | agcgttattacgtaaaaaatcttgccagctttccccttctaaagggcaaaagt | |
| includes TetR in | gagtatggtgcctatctaacatctcaatggctaaggcgtcgagcaaagccc | |
| reverse direction | gcttattttttacatgccaatacaatgtaggctgctctacacctagcttctggg | |
| | cgagtttacgggttgttaaaccttcgattccgacctcattaagcagctctaat | |
| | gcgctgttaatcactttacttttatctaatctagacatcattaattcctaattttt | |
| | gttgacactctatcattgatagagttattttaccactccctatcagtgatagagaa | |
| | aagtgaactctagaaataattttgtttaactttaagaaggagatatacatatga | |
| | tgaagcgcaatattctggcagtgatcgtccctgctctgttagtagcaggtac | |
| | tgcaaacgctcatgctgatggttctttctctgatgagatgaacaccattcttga | |
| | taatcttgccgccagggactttataaactggttgattcagaccaaaatcactg | |
| | acaggtgacacatttccccgaaaagtgccgatggccccccgatggtagtg | |
| | tggccccatgcgagagtagggaactgccaggcatcaaataaaacgaaag | |
| | gctcagtcgaaagactgggcctttcgttttatctgttgtttgtcggtgaacgct | |
| | ctcctgagtaggacaaatccgccgggagcggatttgaacgttgcgaagca | |
| | acggcccggagggtggcgggcaggacgcccgccataaactgccaggc | |
| | atcaaattaagcagaaggccatcctgacggatggcctttttgcgtggccag | |
| | tgccaagcttgcatgcagattgcagcattacacgtcttgagcgattgtgtag | |
| | gctggagctgcttcgaagttcctatactttctagagaataggaacttcggaat | |
| | aggaacttc | |
| human GLP2 | atgatgaagcgcaatattctggcagtgatcgtccctgctctgttagtagcag | SEQ ID NO: |
| construct with a N | gtactgcaaacgctcatgctgatggttctttctctgatgagatgaacaccatt | 326 |
| terminal OmpF | cttgataatcttgccgccagggactttataaactggttgattcagaccaaaat | |
| secretion tag (sec- | cactgacaggtga | |
| dependent secretion | | |
| system) | | |
| human GLP2 | taagacccactttcacatttaagttgatttctaatccgcatatgatcaattcaa | SEQ ID NO: |
| construct with a N | ggccgaataagaaggctggctctgcaccttggtgatcaaataattcgatag | 327 |
| terminal TorA | cttgtcgtaataatggcggcatactatcagtagtaggtgtttccctttcttcttt | |
| secretion tag (tat | agcgacttgatgctcttgatcttccaatacgcaacctaaagtaaaatgcccc | |
| secretion system) | acagcgctgagtgcatataatgcattctctagtgaaaaaccttgttggcata | |
| under the control of | aaaaggctaattgattttcgagagtttcatactgatttctgtaggccgtgtacc | |
| a tet inducible | taaatgtacttttgctccatcgcgatgacttagtaaagcacatctaaaactttt | |
| promoter | agcgttattacgtaaaaaatcttgccagctttccccttctaaagggcaaaagt | |
| | gagtatggtgcctatctaacatctcaatggctaaggcgtcgagcaaagccc | |
| | gcttattttttacatgccaatacaatgtaggctgctctacacctagcttctggg | |
| | cgagtttacgggttgttaaaccttcgattccgacctcattaagcagctctaat | |
| | gcgctgttaatcactttacttttatctaatctagacatcattaattcctaattttt | |
| | gttgacactctatcattgatagagttattttaccactccctatcagtgatagagaa | |
| | aagtgaactctagaaataattttgtttaactttaagaaggagatatacatAT | |
| | GAACAATAACGATCTCTTTCAGGCATCACGT | |
| | CGGCGTTTTCTGGCACAACTCGGCGGCTTAA | |
| | CCGTCGCCGGGATGCTGGGGCCGTCATTGTT | |
| | AACGCCGCGACGTGCGACTGCGcatgctgatggttctt | |
| | tctctgatgagatgaacaccattcttgataatcttgccgccagggactttata | |
| | aactggttgattcagaccaaaatcactgactaataacacatttccccgaaaa | |
| | gtgccgatggccccccgatggtagtgtggcccatgcgagagtagggaac | |
| | tgccaggcatcaaataaaacgaaaggctcagtcgaaagactgggcctttc | |
| | gttttatctgttgtttgtcggtgaacgctctcctgagtaggacaaatccgccg | |
| | ggagcggatttgaacgttgcgaagcaacggcccggagggtggcgggca | |
| | ggacgcccgccataaactgccaggcatcaaattaagcagaaggccatcc | |
| | tgacggatggcctttttgcgtggccagtgccaagcttgcatgcagattgca | |
| | gcattacacgtcttgagcgattgtgtaggctggagctgcttcgaagttcctat | |
| | actttctagagaataggaacttcggaataggaacttc | |
| GLP-2 with TORA tag | ATGAACAATAACGATCTCTTTCAGGCATCAC | SEQ ID NO: |
| | GTCGGCGTTTTCTGGCACAACTCGGCGGCTT | 328 |
| | AACCGTCGCCGGGATGCTGGGGCCGTCATTG | |
| | TTAACGCCGCGACGTGCGACTGCGcatgctgatggt | |
| | tctttctctgatgagatgaacaccattcttgataatcttgccgccagggacttt | |
| | ataaactggttgattcagaccaaaatcactgac | |

[1156] In some embodiments, genetically engineered bacteria comprise a nucleic acid sequence that is at least about 80%, at least about 85%, at least about 90%, at least about 95%, or at least about 99% homologous to the DNA sequence of SEQ ID NO: 321, SEQ ID NO: 322, SEQ ID NO: 323, SEQ ID NO: 324, SEQ ID NO: 325, SEQ ID NO: 326, SEQ ID NO: 327, and SEQ ID NO: 328. Table 71 lists exemplary secretion constructs.

TABLE 71
Non-limiting Examples of Secretion Constructs

| Description | Sequences | SEQ ID NO |
|---|---|---|
| Ptet-phoA-hIL10 | gaattcgttaagacccactttcacatttaagttgtttttctaatccgcatat | SEQ ID NO: |
| | gatcaattcaaggccgaataagaaggctggctctgcaccttggtgatca | 329 |
| | aataattcgatagcttgtcgtaataatggcggcatactatcagtagtagg | |
| | tgtttccctttcttctttagcgacttgatgctcttgatcttccaatacgcaac | |
| | ctaaagtaaaatgccccacagcgctgagtgcatataatgcattctctagt | |
| | gaaaaaccttgttggcataaaaaggctaattgattttcgagagtttcata | |
| | ctgtttttctgtaggccgtgtacctaaatgtacttttgctccatcgcgatga | |
| | cttagtaaagcacatctaaaacttttagcgttattacgtaaaaaatcttgc | |
| | cagctttccccttctaaagggcaaaagtgagtatggtgcctatctaacatc | |
| | tcaatggctaaggcgtcgagcaaagcccgcttattttttacatgccaatac | |
| | aatgtaggctgctctacacctagcttctgggcgagtttacgggttgttaaa | |
| | ccttcgattccgacctcattaagcagctctaatgcgctgttaatcactttac | |
| | ttttatctaatctagacatcattaattcctaatttttgttgacactctatcatt | |
| | gatagagttattttaccactccctatcagtgatagagaaaagtgaa | |
| | GACGCCAGAGAGTTAAGGGGGTTAAATGAA | |
| | ACAATCGACCATCGCATTGGCGCTGCTTCCTC | |
| | TATTGTTCACACCGGTGACAAAGGCA | |
| | TCGCCAGGTCAAGGAACGCAGTCAGAGAATT | |
| | CATGCACTCACTTTCCGGGCAATCTGCCGAA | |
| | TATGCTGCGCGATCTGCGAGATGCATTCTCTC | |
| | GCGTGAAAACGTTCTTTCAAATGAAAGATCA | |
| | ACTGGATAATCTGCTGCTGAAGGAGTCGTTG | |
| | TTGGAGGATTTTAAGGGGTATCTGGGTTGTC | |
| | AAGCACTGTCTGAAATGATTCAATTTTACTTG | |
| | GAGGAAGTTATGCCGCAAGCGGAAAACCAA | |
| | GATCCGGATATTAAGGCGCACGTGAACTCAC | |
| | TGGGCGAAAACCTGAAAACTTTGCGCCTGCG | |
| | TCTGAGACGATGTCACCGATTCCTGCCGTGT | |
| | GAAAACAAGTCAAAGGCGGTTGAGCAAGTT | |
| | AAGAATGCTTTCAATAAGCTGCAAGAAAAGG | |
| | GCATCTATAAAGCGATGTCTGAATTTGATAT | |
| | CTTTATAAACTACATAGAAGCTTATATGACT | |
| | ATGAAGATTCGAAATTAA | |
| phoA-hIL10 | GACGCCAGAGAGTTAAGGGGGTTAAATGAA | SEQ ID NO: |
| | ACAATCGACCATCGCATTGGCGCTGCTTCCTC | 330 |
| | TATTGTTCACACCGGTGACAAAGGCA | |
| | TCGCCAGGTCAAGGAACGCAGTCAGAGAATT | |
| | CATGCACTCACTTTCCGGGCAATCTGCCGAA | |
| | TATGCTGCGCGATCTGCGAGATGCATTCTCTC | |
| | GCGTGAAAACGTTCTTTCAAATGAAAGATCA | |
| | ACTGGATAATCTGCTGCTGAAGGAGTCGTTG | |
| | TTGGAGGATTTTAAGGGGTATCTGGGTTGTC | |
| | AAGCACTGTCTGAAATGATTCAATTTTACTTG | |
| | GAGGAAGTTATGCCGCAAGCGGAAAACCAA | |
| | GATCCGGATATTAAGGCGCACGTGAACTCAC | |
| | TGGGCGAAAACCTGAAAACTTTGCGCCTGCG | |
| | TCTGAGACGATGTCACCGATTCCTGCCGTGT | |
| | GAAAACAAGTCAAAGGCGGTTGAGCAAGTT | |
| | AAGAATGCTTTCAATAAGCTGCAAGAAAAGG | |
| | GCATCTATAAAGCGATGTCTGAATTTGATAT | |
| | CTTTATAAACTACATAGAAGCTTATATGACT | |
| | ATGAAGATTCGAAATTAA | |
| fliC UTR-RBS- | tgacggcgattgagccgacgggtggaaacccaaaacgtaatcaact | SEQ ID NO: |
| pvIL10 | caaatcccttaataaggaggtaaaATGGGTACTGACCAA | 331 |
| | TGTGATAATTTCCCACAAATGCTGCGTGATTT | |
| | GCGCGACGCTTTCTCGCGTGTGAAAACTTTTT | |
| | TTCAGACTAAAGATGAGGTGGATAATCTGCT | |
| | GCTGAAAGAGAGCCTGTTGGAAGATTTTAAA | |
| | GGCTACTTGGGCTGTCAAGCGCTGTCGGAGA | |
| | TGATTCAATTTTATCTGGAAGAGGTGATGCC | |
| | GCAAGCTGAGAACCAAGATCCGGAAGCGAA | |
| | AGATCACGTGAATTCGCTGGGCGAGAATCTG | |
| | AAAACTCTGCGTCTGCGTCTGCGTCGTTGTCA | |
| | CCGTTTTTTGCCGTGCGAAAACAAAAGTAAA | |
| | GCTGTTGAGCAAATTAAAAACGCTTTTAACA | |
| | AACTGCAGGAAAAAGGTATCTATAAAGCGAT | |
| | GAGCGAATTTGATATTTTTATTAATTATATTG | |
| | AAGCTTATATGACTATTAAAGCTCGCTAA | |
| Ptet-phoA-vIL10 | Gaattcgttaagacccactttcacatttaagttgtttttctaatccgcatat | SEQ ID NO: |
| | gatcaattcaaggccgaataagaaggctggctctgcaccttggtgatca | 332 |
| | aataattcgatagcttgtcgtaataatggcggcatactatcagtagtagg | |
| | tgtttccctttcttctttagcgacttgatgctcttgatcttccaatacgcaac | |
| | ctaaagtaaaatgccccacagcgctgagtgcatataatgcattctctagt | |
| | gaaaaaccttgttggcataaaaaggctaattgattttcgagagtttcata | |
| | ctgtttttctgtaggccgtgtacctaaatgtacttttgctccatcgcgatga | |
| | cttagtaaagcacatctaaaacttttagcgttattacgtaaaaaatcttgc | |
| | cagctttccccttctaaagggcaaaagtgagtatggtgcctatctaacatc | |
| | tcaatggctaaggcgtcgagcaaagcccgcttattttttacatgccaatac | |
| | aatgtaggctgctctacacctagcttctgggcgagtttacgggttgttaaa | |
| | ccttcgattccgacctcattaagcagctctaatgcgctgttaatcactttac | |
| | ttttatctaatctagacatcattaattcctaatttttgttgacactctatcatt | |
| | gatagagttattttaccactccctatcagtgatagagaaaagtgaa | |
| | GACGCCAGAGAGTTAAGGGGGTTAAATGAA | |
| | ACAATCGACCATCGCATTGGCGCTGCTTCCTC | |
| | TATTGTTCACACCGGTGACAAAGGCA | |
| | GGTACAGACCAATGTGACAATTTTCCCCAAA | |
| | TGTTGAGGGACCTAAGAGATGCCTTCAGTCG | |
| | TGTTAAAACCTTTTTCCAGACAAAGGACGAG | |
| | GTAGATAACCTTTTGCTCAAGGAGTCTCTGCT | |
| | AGAGGACTTTAAGGGCTACCTTGGATGCCAG | |
| | GCCCTGTCAGAAATGATCCAATTCTACCTGG | |
| | AGGAAGTCATGCCACAGGCTGAAAACCAGG | |
| | ACCCTGAAGCCAAAGACCATGTCAATTCTTT | |
| | GGGTGAAAATCTAAAGACCCTACGGCTCCGC | |
| | CTGCGCCGTTGCCACAGGTTCCTGCCGTGTG | |
| | AGAACAAGAGTAAAGCTGTGGAACAGATAA | |
| | AAAATGCCTTTAACAAGCTGCAGGAAAAAGG | |
| | AATTTACAAAGCCATGAGTGAATTTGACATT | |
| | TTTATTAACTACATAGAAGCATACATGACAA | |
| | TTAAAGCCAGG | |
| phoA-vIL10 | GACGCCAGAGAGTTAAGGGGGTTAAATGAA | SEQ ID NO: |
| | ACAATCGACCATCGCATTGGCGCTGCTTCCTC | 333 |
| | TATTGTTCACACCGGTGACAAAGGCA | |
| | GGTACAGACCAATGTGACAATTTTCCCCAAA | |
| | TGTTGAGGGACCTAAGAGATGCCTTCAGTCG | |
| | TGTTAAAACCTTTTTCCAGACAAAGGACGAG | |
| | GTAGATAACCTTTTGCTCAAGGAGTCTCTGCT | |
| | AGAGGACTTTAAGGGCTACCTTGGATGCCAG | |
| | GCCCTGTCAGAAATGATCCAATTCTACCTGG | |
| | AGGAAGTCATGCCACAGGCTGAAAACCAGG | |
| | ACCCTGAAGCCAAAGACCATGTCAATTCTTT | |
| | GGGTGAAAATCTAAAGACCCTACGGCTCCGC | |
| | CTGCGCCGTTGCCACAGGTTCCTGCCGTGTG | |
| | AGAACAAGAGTAAAGCTGTGGAACAGATAA | |
| | AAAATGCCTTTAACAAGCTGCAGGAAAAAGG | |
| | AATTTACAAAGCCATGAGTGAATTTGACATT | |
| | TTTATTAACTACATAGAAGCATACATGACAA | |
| | TTAAAGCCAGG | |
| Ptet-PhoA-IL22 | Gaattcgttaagacccactttcacatttaagttgtttttctaatccgcatat | SEQ ID NO: |
| | gatcaattcaaggccgaataagaaggctggctctgcaccttggtgatca | 334 |
| | aataattcgatagcttgtcgtaataatggcggcatactatcagtagtagg | |
| | tgtttccctttcttctttagcgacttgatgctcttgatcttccaatacgcaac | |
| | ctaaagtaaaatgccccacagcgctgagtgcatataatgcattctctagt | |
| | gaaaaaccttgttggcataaaaaggctaattgattttcgagagtttcata | |
| | ctgtttttctgtaggccgtgtacctaaatgtacttttgctccatcgcgatga | |
| | cttagtaaagcacatctaaaacttttagcgttattacgtaaaaaatcttgc | |
| | cagctttccccttctaaagggcaaaagtgagtatggtgcctatctaacatc | |
| | tcaatggctaaggcgtcgagcaaagcccgcttattttttacatgccaatac | |
| | aatgtaggctgctctacacctagcttctgggcgagtttacgggttgttaaa | |
| | ccttcgattccgacctcattaagcagctctaatgcgctgttaatcactttac | |
| | ttttatctaatctagacatcattaattcctaatttttgttgacactctatcatt | |
| | gatagagttattttaccactccctatcagtgatagagaaaagtgaa | |
| | GACGCCAGAGAGTTAAGGGGGTTAAATGAA | |
| | ACAATCGACCATCGCATTGGCGCTGCTTCCTC | |
| | TATTGTTCACACCGGTGACAAAGGCA | |
| | GCACCGATCTCTTCCCACTGTCGCTTAGATAA | |
| | ATCGAATTTTCAACAACCTTATATTACGAATC | |
| | GTACGTTTATGCTGGCTAAAGAAGCGTCATT | |
| | AGCTGATAACAACACTGATGTTCGCCTGATT | |
| | GGTGAGAAATTGTTTCACGGTGTGTCTATGTC | |
| | AGAACGTTGCTACCTGATGAAACAAGTTCTG | |
| | AATTTCACCCTGGAAGAAGTGTTGTTTCCGC | |
| | AATCTGACCGCTTTCAACCGTATATGCAAGA | |
| | GGTTGTGCCGTTTCTGGCGCGCCTGAGTAATC | |
| | GCCTGAGCACTTGTCATATTGAGGGCGACGA | |
| | CCTGCATATTCAACGAAATGTTCAAAAATTG | |
| | AAAGATACGGTGAAGAAACTGGGTGAAAGT | |
| | GGTGAAATCAAAGCGATTGGTGAGCTGGATC | |
| | TGCTGTTTATGTCATTGCGCAATGCGTGCATT | |
| | TAA | |
| PhoA-IL22 | GACGCCAGAGAGTTAAGGGGGTTAAATGAA | SEQ ID NO: |
| | ACAATCGACCATCGCATTGGCGCTGCTTCCTC | 335 |
| | TATTGTTCACACCGGTGACAAAGGCA | |
| | GCACCGATCTCTTCCCACTGTCGCTTAGATAA | |
| | ATCGAATTTTCAACAACCTTATATTACGAATC | |
| | GTACGTTTATGCTGGCTAAAGAAGCGTCATT | |
| | AGCTGATAACAACACTGATGTTCGCCTGATT | |
| | GGTGAGAAATTGTTTCACGGTGTGTCTATGTC | |
| | AGAACGTTGCTACCTGATGAAACAAGTTCTG | |
| | AATTTCACCCTGGAAGAAGTGTTGTTTCCGC | |
| | AATCTGACCGCTTTCAACCGTATATGCAAGA | |
| | GGTTGTGCCGTTTCTGGCGCGCCTGAGTAATC | |
| | GCCTGAGCACTTGTCATATTGAGGGCGACGA | |
| | CCTGCATATTCAACGAAATGTTCAAAAATTG | |
| | AAAGATACGGTGAAGAAACTGGGTGAAAGT | |
| | GGTGAAATCAAAGCGATTGGTGAGCTGGATC | |
| | TGCTGTTTATGTCATTGCGCAATGCGTGCATT | |
| | TAA | |
| | GACGCCAGAGAGTTAAGGGGGTTAAATGAA | SEQ ID NO: |
| | ACAATCGACCATCGCATTGGCGCTGCTTCCTC | 336 |
| | TATTGTTCACACCGGTGACAAAGGCA | |

[1157] In some embodiments, genetically engineered bacteria comprise a nucleic acid sequence that is at least about 80%, at least about 85%, at least about 90%, at least about 95%, or at least about 99% homologous to the DNA sequence of SEQ ID NO: 329, SEQ ID NO: 330, SEQ ID NO: 331, SEQ ID NO: 332, SEQ ID NO: 333, SEQ ID NO: 334, SEQ ID NO: 335, and SEQ ID NO: 336.

### Example 47

### Bacterial Secretion of hIL-10 and vIL-10

[1158] To determine whether the human IL-10 and vIL-10 expressed by engineered bacteria is secreted, the concentration of IL-10 in the bacterial supernatant from a selection of engineered strains comprising various hIL-10 and vIL-10 constructs/strains was measured (see Table 62, Table 63, Table 64, Table 65, Table 66 for components and sequences for hIL-10 and vIL-10 constructs/strains).

[1159] E. coli Nissle comprising various tet-inducible constructs or constructs under the native fliC promoter were grown overnight in LB medium. Cultures were diluted 1:200 in LB and grown shaking (200 rpm) for 2 hours. Cultures were diluted to an optical density of 0.5 at which time anhydrous tetracycline (ATC) was added to cultures at a concentration of 100 ng/mL to induce expression of hIL-10. No tetracycline was added to cultures harboring the fliC constructs. After 12 hours of induction, cells were spun down, and supernatant was collected. To generate cell free medium, the clarified supernatant was further filtered through a 0.22-micron filter to remove any remaining bacteria and placed on ice. Additionally, to detect intracellular recombinant protein production, pelleted were bacteria washed and resuspended in BugBuster™ (Millipore) with protease inhibitors and Ready-Lyse Lysozyme Solution (Epicentre), resulting in lysate concentrated 10-fold compared to original culture conditions. After incubation at room temperature for 10 minutes insoluble debris is spun down at 20 min at 12,000 rcf at 4° C. then placed on ice until further processing.

[1160] The concentration of hIL-10 in the cell-free medium and in the bacterial cell extract was measured by hIL-10 ELISA (R&D Systems DY217B), according to manufacturer's instructions Similarly, to determine the concentrations of vIL-10 an Ultrasensitive ELISA kit (Alpco, 45-I10HUU-E01) was employed using commercially available recombinant vIL-10 (R&D Systems, 915-VL-010). All samples were run in triplicate, and a standard curve was used to calculate secreted levels of IL-10. Standard curves were generated using both human and viral recombinant proteins. Wild type Nissle was included in the ELISA as a negative control, and no signal was observed. Table 72 and Table 73 summarize levels of hIL10 and vIL-10 measured in the supernatant. The data show that both vIL-10 and hIL-10 are secreted at various levels from the different bacterial strains.

TABLE 72
hIL-10 Secretion

| | hu IL-10 |
|---|---|
| | (ng/ml) |
| Sample | (extracellular) |
| WT | 0 |
| IL-10 Plasmid (Nissle | 8.4 |
| pUC57.Ptet-phoA-hIL10) | |
| IL-10 plasmid/lpp | 19.3 |
| (lpp::Cm pUC57.Ptet-phoA- | |
| hIL10) | |
| 2083 IL-10 plasmid/nlpI | 20.5 |
| (nlpI::Cm pUC57.Ptet-phoA- | |
| hIL10) | |
| 2084 IL-10 plasmid/tolA | 21.4 |
| (tolA::Cm pUC57.Ptet-phoA- | |
| hIL10) | |
| 2085 IL-10 plasmid/pal | 28.4 |
| (PAL::Cm pUC57.Ptet-phoA- | |
| hIL10) | |

TABLE 73
vIL-10 Secretion

| | vIL-10 |
|---|---|
| | (ng/ml) |
| Sample | (extracellular) |
| WT | 0 |
| fliC-pvIL10 (Nissle | 29 |
| pUN fli-vIL10 Kan Cm) | |
| fliC::vIL10 (Nissle | 9 |
| fliC::vIL10 delta fliD CmR) | |
| vIL-10 lpp (Nissle lpp | 527 |
| mutant with vIL10 pBR3222 | |
| tet plasmid) | |
| vIL-10 nlp1 (Nissle | 982 |
| delta nlpI::CmR pBR322.Ptet- | |
| phoA-vIL10) | |
| vIL-10 tolA (Nissle | 428 |
| delta tolA::CmR pBR322.Ptet- | |
| phoA-vIL10) | |
| vIL-10 pal (Nissle delta | 1090 |
| PAL::CmR pBR322.Ptet- | |
| phoA-vIL10 | |

### Co-Culture Studies

[1161] To determine whether the hIL-10 and viral IL-10 expressed by the genetically engineered bacteria shown in Table 72 and Table 73 is biologically functional, in vitro experimentation is conducted, in which the bacterial supernatant containing secreted human or viral IL-10 is added to the growth medium of a Raji cells (a hematopoietic cell line) and J774a1 cells (a macrophage cell line). IL-10 is known to induce the phosphorylation of STAT3 in these cells Functional activity of bacterially secreted IL-10 is therefore assessed by its ability to phosphorylate STAT3 in Raji and J774a1 cells.

[1162] Raji cells are grown in RPM! 1640 supplemented with 10% FBS supplemented with 10% fetal bovine serum at 37° C. in a humidified incubator supplemented with 5% CO2. Prior to treatment with the bacterial supernatant, RPMI 1640 supplemented with 10% FBS (1e6/24 well) are serum starved overnight. Titrations of either recombinant human IL-10 diluted in LB or clarified supernatant from wild type Nissle or the engineered bacteria are added to cells for 30 minutes. Cells are harvested and resuspended in lysis buffer, and phospho-STAT3 ELISA (ELISA pSTAT3 (Tyr705) (Cell Signaling Technology)) is run in triplicate for all samples, according to manufacturer's instructions. PBS-treated cells and PBS are added as negative controls. Dilutions of samples are included to demonstrate linearity.

[1163] Competition Studies

[1164] As an additional control for specificity, a competition assay is performed. Titrations of anti-IL10 antibody are pre-incubated with constant concentrations of either rhIL22 (data not shown) or supernatants from the engineered bacteria expressing human or viral IL-22 for 15 min. Next, the supernatants/ rhIL2 solutions are added to serum-starved Raji cells (1e6/well) and cells are incubated for 30 min followed by pSTAT3 ELISA as described above.

[1165] In other embodiments, similar studies are conducted with J774a1 cells.

### Example 48

### Bacterial Secretion of GLP-2

[1166] To determine whether the human GLP-2 expressed by engineered bacteria is secreted, the concentration of GLP-2 in the bacterial supernatant from two engineered strains comprising GLP-2 constructs/strains was measured. The first strain comprising a deletion in PAL and a plasmid expressing GLP-2 with an OmpF secretion tag from a tetracycline-inducible promoter and the second strain comprises the same PAL deletion and the same plasmid expressing GLP-2, further comprising a deletion in degP (see Table 74).

[1167] E. coli Nissle comprising various tet-inducible constructs or constructs under the native fliC promoter were grown overnight in LB medium. Cultures were diluted 1:200 in LB and grown shaking (200 rpm) for 2 hours. Cultures were diluted to an optical density of 0.5 at which time anhydrous tetracycline (ATC) was added to cultures at a concentration of 100ng/mL to induce expression of hIL-10. No tetracycline was added to cultures harboring the fliC constructs. After 12 hours of induction, cells were spun down, and supernatant was collected. To generate cell free medium, the clarified supernatant was further filtered through a 0.22-micron filter to remove any remaining bacteria and placed on ice. Additionally, to detect intracellular recombinant protein production, pelleted were bacteria washed and resuspended in BugBuster™ (Millipore) with protease inhibitors and Ready-Lyse Lysozyme Solution (Epicentre), resulting in lysate concentrated 10-fold compared to original culture conditions. After incubation at room temperature for 10 minutes insoluble debris is spun down at 20 min at 12,000 rcf at 4° C. then placed on ice until further processing.

[1168] The concentration of GLP-2 in the cell-free medium and in the bacterial cell extract was measured by Human GLP2 ELISA Kit (Competitive EIA) (LSBio), according to manufacturer's instructions. All samples were run in triplicate, and a standard curve was used to calculate secreted levels of GLP-2. Standard curves were generated using recombinant GLP-2. Wild type Nissle was included in the ELISA as a negative control, and no signal was observed. As seen in Table 74, deletion of degP, a periplasmic protease, improved secretion levels over 3-fold.

TABLE 74
GLP-2 Secretion

| DOM mut | ng/ml |
|---|---|
| WT | 1.14 |
| PAL::CmR Ptet-ompF-GLP2 | 1793.2 |
| PAL::CmR ompT::Kan Ptet- | 1142.1 |
| ompF-GLP2 | |
| PAL::CmR ompT::Kan phoA- | 5360.4 |
| GLP2 fusion | |

### Co-Culture Studies

[1169] To determine whether the hGLP-2 expressed by the genetically engineered bacteria is biologically functional, in vitro experimentation is conducted, in which the bacterial supernatant (from both strains shown above) containing secreted human GLP-2 is added to the growth medium of Caco-2 cells and CCD-18 Co cells. The Caco-2 cell line is a continuous cell of heterogeneous human epithelial colorectal adenocarcinoma cells. As described e.g., in Jasleen et al. (Dig Dis Sci. 2002 May; 47(5):1135-40) GLP-2 stimulates proliferation and [3H]thymidine incorporation in Caco-2 and T84 cells. Additionally, GLP-2 stimulates VEGFA secretion in these cells (see., e.g., Bulut et al, Eur J Pharmacol. 2008 Jan. 14; 578(2-3):279-85.

[1170] Functional activity of bacterially secreted GLP-2 is therefore assessed by its ability to induce proliferation and VEGF secretion.

[1171] Caco-2 are grown in Dulbecco's modified Eagle's medium supplemented with 10% fetal bovine serum at 37° C. in a humidified incubator supplemented with 5% CO2. Prior to treatment with the bacterial supernatant, Caco-2 cells (1e6/24 well) are serum starved overnight. Titrations of either recombinant human GLP-2 (50 and 250 nM) diluted in LB or clarified supernatant from wild type Nissle or the engineered bacteria are added to cells for a defined time.

[1172] For cell proliferation assays, cells are harvested and resuspended in lysis buffer. The cells are assayed after 12, 24, 48, and 72 hours of incubation. Cell proliferation is measured using a Cell proliferation assay kit according to manufacturer's instruction (e.g., a Cell viability was assessed by a 3-[4, 5-dimethylthiazol-2-yl]-2, 5-diphenyl-tetrazolium bromide (MTT)-assay).

[1173] For the measurements of VEFA secretion, cells are harvested and resuspended in lysis buffer, and concentrations of GLP-2 in the medium are determined ELISA

[1174] PBS-treated cells and PBS are added as negative controls. Dilutions of samples are included to demonstrate linearity.

### Competition Studies

[1175] As an additional control for specificity, a competition assay is performed. Titrations of anti-GLP-2 antibody are pre-incubated with constant concentrations of either recombinant GLP-2 or supernatants from the engineered bacteria for 15 min. Next, the supernatants/ rhIL2 solutions are added to serum-starved Cac-2 cells (1e6/well) and cells are incubated for 30 min followed by VEGFA ELISA as described above.

### Example 49

### Bacterial Secretion of IL-22

[1176] To determine whether the human IL-22 expressed by engineered bacteria is secreted, the concentration of IL-22 in the bacterial supernatant from two engineered strains comprising IL-22 constructs/strains was measured. The first strain comprising a deletion in PAL and a plasmid expressing IL-22 with an OmpF secretion tag from a tetracycline-inducible promoter and the second strain comprises the same PAL deletion and the same plasmid expressing IL-22, further comprising a deletion in degP (Table 75).

[1177] E. coli Nissle comprising various tet-inducible constructs or constructs under the native fliC promoter were grown overnight in LB medium. Cultures were diluted 1:200 in LB and grown shaking (200 rpm) for 2 hours. Cultures were diluted to an optical density of 0.5 at which time anhydrous tetracycline (ATC) was added to cultures at a concentration of 100 ng/mL to induce expression of hIL-10. No tetracycline was added to cultures harboring the fliC constructs. After 12 hours of induction, cells were spun down, and supernatant was collected. To generate cell free medium, the clarified supernatant was further filtered through a 0.22-micron filter to remove any remaining bacteria and placed on ice. Additionally, to detect intracellular recombinant protein production, pelleted were bacteria washed and resuspended in BugBuster™ (Millipore) with protease inhibitors and Ready-Lyse Lysozyme Solution (Epicentre), resulting in lysate concentrated 10-fold compared to original culture conditions. After incubation at room temperature for 10 minutes insoluble debris is spun down at 20 min at 12,000 rcf at 4.0 then placed on ice until further processing.

[1178] The concentration of IL-22 in the cell-free medium and in the bacterial cell extract was measured by hIL-22 ELISA (R&D Systems (DY782) ELISA for hIL-22), according to manufacturer's instructions. All samples were run in triplicate, and a standard curve was used to calculate secreted levels of IL-22. Standard curves were generated using recombinant IL-22. Wild type Nissle was included in the ELISA as a negative control, and no signal was observed. Table 75 summarizes levels of IL-22 measured in the supernatant. The data show that both hIL-22 are secreted at various levels from the different bacterial strains.

TABLE 75
IL-22 Secretion

| | IL-22 |
|---|---|
| | Production/Secretion |
| | Dilution Corrected |
| Genotype | (ng/ml) |
| WT | 20.7 |
| Lpp (delta lpp::CmR | 87.6 |
| expressing PhoA-IL22 from | |
| Ptet) | |
| nlpI (delta nlpI::CmR | 105.4 |
| expressing PhoA-IL22 from | |
| Ptet) | |
| tolA (delta tolA::CmR | 623.2 |
| expressing PhoA-IL22 from | |
| Ptet) | |
| PAL (delta pal::CmR | 328.8 |
| expressing PhoA-IL22 from | |
| Ptet) | |

### Example 50

### Bacterial Secretion of IL-22 and Functional Assays

### Generation of Bacterial Supernatant and Measurement of IL-22 Concentration

[1179] To determine whether the human IL-22 expressed by engineered bacteria is secreted, the concentration of IL-22 in the bacterial supernatant was measured.

[1180] E. coli Nissle comprising a tet-inducible integrated construct (delta pal::CmR expressing PhoA-IL22 from Ptet) was grown overnight in LB medium. Cultures were diluted 1:200 in LB and grown shaking (200 rpm) for 2 hours. Cultures were diluted to an optical density of 0.5 at which time anhydrous tetracycline (ATC) was added to cultures at a concentration of 100ng/mL to induce expression of hIL-22. After 12 hours of induction, cells were spun down, and supernatant was collected. To generate cell free medium, the supernatant was centrifuged, and filtered through a 0.22-micron filter to remove any remaining bacteria.

[1181] The concentration of hIL-22 in the cell-free medium was measured by hIL-22 ELISA (R&D Systems (DY782) ELISA for hIL-22), per manufacturer's instructions. All samples were run in triplicate, and a standard curve was used to calculate secreted levels of IL-22. Additionally, samples were diluted to ensure absence of matrix effects and to demonstrate linearity. Wild type Nissle was included in the ELISA as a negative control, and no signal was observed. The engineered bacteria comprising a PAL deletion and the integrated construct encoding hIL-22 with a phoA secretion tag were determined to be secreting at 199 ng/ml supernatant.

### Co-Culture Studies

[1182] To determine whether the hIL-22 expressed by the genetically engineered bacteria is biologically functional, in vitro experimentation was conducted, in which the bacterial supernatant containing secreted human IL-22 was added to the growth medium of a mammalian colonic epithelial cell line. IL-22 is known to induce the phosphorylation of STAT1 and STAT3 in Colo205 cells (see, e.g., Nagalakshmi et al., Interleukin-22 activates STAT3 and induces IL-10 by colon epithelial cells. Int Immunopharmacol. 2004 May; 4(5):679-91). Functional activity of bacterially secreted IL-22 was therefore assessed by its ability to phosphorylate STAT3 in Colo205 cells.

[1183] Colo205 cells were grown in Dulbecco's modified Eagle's medium supplemented with 10% fetal bovine serum at 37° C. in a humidified incubator supplemented with 5% CO2. Prior to treatment with the bacterial supernatant, Colo205 (1e6/24 well) were serum starved overnight. Titrations of either recombinant human IL-22 diluted in LB or clarified supernatant from wild type Nissle or the engineered bacteria were added to cells for 30 minutes. Cells were harvested and resuspended in lysis buffer, and phospho-STAT3 ELISA (ELISA pSTAT3 (Tyr705) (Cell Signaling Technology)) was run in triplicate for all samples, according to manufacturer's instructions. PBS-treated cells and PBS were added as negative controls. Dilutions of samples were included to demonstrate linearity. No signal was observed for wild type Nissle. Results for the engineered strain comprising a PAL deletion and the integrated construct encoding hIL-22 with a phoA secretion tag are shown in FIG. 26A, and demonstrate that hIL-22 secreted from the engineered bacteria is functionally active.

### Competition Studies

[1184] As an additional control for specificity, a competition assay was performed. Titrations of anti-IL22 antibody (MAB7821, R&D Systems) were pre-incubated with constant concentrations of either rhIL22 (data not shown) or supernatants from the engineered bacteria for 15 min. Next, the supernatants/ rhIL2 solutions were added to serum-starved Colo205 cells (1e6/well) and cells were incubated for 30 min followed by pSTAT3 ELISA as described above. As shown in FIG. 26B, the phospho-Stat3 signal induced by the secreted hIL-22 is competed by the hIL-22 antibody MAB7821.

### Example 51

### Bacterial Secretion of GLP-1

[1185] The concentration of secreted GLP-lin the bacterial supernatant from four engineered strains comprising GLP-1 constructs/strains with different ribosome binding site (RBS) strength and two different secretion tags (PhoA or OmpF) were measured and compared.

[1186] All of the constructs were tested in a deltaLpp background. Strains are described in Table 76 (and shown in FIG. 24 and FIG. 25). 20K, 100K and 67K are numbers indicating the strengths of the RBS as determined by bioinformatics on an arbitrary scale, e.g., strength of 20K<67K<100K.

[1187] Strains were grown overnight in LB medium. Cultures were diluted 1:200 in LB and grown shaking (200 rpm). Cultures were diluted to an optical density of 0.5 at which time strains were induced with ATC (100 ng/mL). After 12 hours of induction, cells were spun down, and supernatant was collected. To generate cell free medium, the clarified supernatant was further filtered through a 0.22 micron filter to remove any remaining bacteria and placed on ice. Additionally, to detect intracellular recombinant protein production, pelleted were bacteria washed and resuspended in BugBuster™ (Millipore) with protease inhibitors and Ready-Lyse Lysozyme Solution (Epicentre), resulting in lysate concentrated 10-fold compared to original culture conditions. After incubation at room temperature for 10 minutes insoluble debris was spun down at 20 min at 12,000 rcf at 4.0 then placed on ice until further processing.

[1188] The concentration of GLP-lin the cell-free medium and in the bacterial cell extract was measured by Abcam kit (ab184857) according to the manufacturers protocol. Standard curves were generated using recombinant GLP-1. Wild type Nissle was included in the ELISA as a negative control, and no signal was observed. Results are shown in Table 76 and FIG. 25C.

TABLE 76
GLP-1 Secretion

| | | ng/mL |
|---|---|---|
| Strain | Genotype | GLP1 |
| SYN2627 | Δlpp TetR-pTet-20K RBS-PhoA-Glp1 | 3.6 |
| SYN2643 | Δlpp TetR-pTet-100K RBS-PhoA-Glp1 | 26.3 |
| SYN2672 | Δlpp TetR-pTet-20K RBS-OmpF-Glp1 | 2 |
| SYN2673 | Δlpp TetR-pTet-67K RBS-OmpF-Glp1 | 57.6 |

TABLE 77
Glp1 Secretion Sequences

| Description | Sequence |
|---|---|
| pTet-20K RBS-PhoA- | TAATTCCTAATTTTTGTTGACACTCTATCATTGAT |
| Glp1 | AGAGTTATTTTACCACTCCCTATCAGTGATAGAG |
| SEQ ID NO: 337 | AAAAGTGAACCAAAACAGAGTCATATTTAAAGG |
| | AAGGTACAAAATGAAGCAGAGCACCATCGCGCT |
| | TGCCCTGCTGCCGTTGCTTTTCACGCCTGTCACCA |
| | AGGCTCACGATGAATTTGAGAGACATGCAGAAG |
| | GAACGTTCACATCTGATGTGTCATCATATTTGGA |
| | AGGCCAAGCTGCCAAAGAATTCATCGCATGGTTG |
| | GTGAAAGGCCGAGGATGA |
| pTet-100K RBS- | TAATTCCTAATTTTTGTTGACACTCTATCATTGAT |
| PhoA-Glp1 | AGAGTTATTTTACCACTCCCTATCAGTGATAGAG |
| SEQ ID NO: 338 | AAAAGTGAAATAAGTTTATCAAAATAAAAGGAG |
| | GTAATATATGAAGCAGAGCACCATCGCGCTTGCC |
| | CTGCTGCCGTTGCTTTTCACGCCTGTCACCAAGGC |
| | TCACGATGAATTTGAGAGACATGCAGAAGGAAC |
| | GTTCACATCTGATGTGTCATCATATTTGGAAGGC |
| | CAAGCTGCCAAAGAATTCATCGCATGGTTGGTGA |
| | AAGGCCGAGGATGA |
| pTet-20K RBS-OmpF- | TAATTCCTAATTTTTGTTGACACTCTATCATTGAT |
| Glp1 | AGAGTTATTTTACCACTCCCTATCAGTGATAGAG |
| SEQ ID NO: 339 | AAAAGTGAAGTCTTCCCGATCCTTTCCCGAGCGT |
| | ACAAAATGATGAAGCGTAACATCTTAGCCGTTAT |
| | TGTCCCCGCATTGCTTGTGGCCGGGACGGCTAAC |
| | GCACACGATGAATTTGAGAGACATGCAGAAGGA |
| | ACGTTCACATCTGATGTGTCATCATATTTGGAAG |
| | GCCAAGCTGCCAAAGAATTCATCGCATGGTTGGT |
| | GAAAGGCCGAGGATGA |
| pTet-67K RBS OmpF- | TAATTCCTAATTTTTGTTGACACTCTATCATTGAT |
| Glp1 | AGAGTTATTTTACCACTCCCTATCAGTGATAGAG |
| SEQ ID NO: 340 | AAAAGTGAAAAAACCGCCATCAAGAGTTAAGGA |
| | GGAGAATATGATGAAGCGTAACATCTTAGCCGTT |
| | ATTGTCCCCGCATTGCTTGTGGCCGGGACGGCTA |
| | ACGCACACGATGAATTTGAGAGACATGCAGAAG |
| | GAACGTTCACATCTGATGTGTCATCATATTTGGA |
| | AGGCCAAGCTGCCAAAGAATTCATCGCATGGTTG |
| | GTGAAAGGCCGAGGATGA |
| 20K RBS | CCAAAACAGAGTCATATTTAAAGGAAGGTACAA |
| SEQ ID NO: 341 | A |
| 67K RBS | AAAACCGCCATCAAGAGTTAAGGAGGAGAAT |
| SEQ ID NO: 342 | |
| 100K RBS | ATAAGTTTATCAAAATAAAAGGAGGTAATAT |
| SEQ ID NO: 343 | |
| PhoA | ATGAAGCAGAGCACCATCGCGCTTGCCCTGCTGC |
| SEQ ID NO: 344 | CGTTGCTTTTCACGCCTGTCACCAAGGCT |
| OmpF | ATGATGAAGCGTAACATCTTAGCCGTTATTGTCC |
| SEQ ID NO: 345 | CCGCATTGCTTGTGGCCGGGACGGCTAACGCA |
| Glp1 | CACGATGAATTTGAGAGACATGCAGAAGGAACG |
| SEQ ID NO: 346 | TTCACATCTGATGTGTCATCATATTTGGAAGGCC |
| | AAGCTGCCAAAGAATTCATCGCATGGTTGGTGAA |
| | AGGCCGAGGATGA |
| PhoA-Glp1 | ATGAAGCAGAGCACCATCGCGCTTGCCCTGCTGC |
| SEQ ID NO: 347 | CGTTGCTTTTCACGCCTGTCACCAAGGCTCACGAT |
| | GAATTTGAGAGACATGCAGAAGGAACGTTCACAT |
| | CTGATGTGTCATCATATTTGGAAGGCCAAGCTGC |
| | CAAAGAATTCATCGCATGGTTGGTGAAAGGCCGA |
| | GGATGA |
| OmpF-Glp1 | ATGATGAAGCGTAACATCTTAGCCGTTATTGTCC |
| SEQ ID NO: 348 | CCGCATTGCTTGTGGCCGGGACGGCTAACGCACA |
| | CGATGAATTTGAGAGACATGCAGAAGGAACGTTC |
| | ACATCTGATGTGTCATCATATTTGGAAGGCCAAG |
| | CTGCCAAAGAATTCATCGCATGGTTGGTGAAAGG |
| | CCGAGGATGA |
| Terminator | AACGATTGGTAAACCCGGTGaacgcatgagAAAGCCC |
| SEQ ID NO: 349 | CCGGAAGATCACCTTCCGGGGGCTTTtttattgcgcGG |
| | ACCAAAACGAAAAAAGACGCTCGAAAGCGTCTC |
| | TTTTCTGGAATTTGGTACCGAGG |

[1189] In some embodiments, genetically engineered bacteria comprise a nucleic acid sequence that is at least about 80%, at least about 85%, at least about 90%, at least about 95%, or at least about 99% homologous to the DNA sequence of SEQ ID NO: 337, SEQ ID NO: 338, SEQ ID NO: 339, SEQ ID NO: 340, SEQ ID NO: 341, SEQ ID NO: 342, SEQ ID NO: 343, SEQ ID NO: 344, SEQ ID NO: 345, SEQ ID NO: 346, SEQ ID NO: 347, SEQ ID NO: 348, and SEQ ID NO: 349.

### Example 52

TABLE 78
Other Sequences of interest

| | |
|---|---|
| Wild-type clbA | caaatatcacataatcttaacatatcaataaacacagtaaagtttcatgtgaaaaacat |
| (SEQ ID NO: 350) | caaacataaaatacaagctcggaatacgaatcacgctatacacattgctaacagga |
| | atgagattatctaaatgaggattgatatattaattggacatactagttatttcatcaaac |
| | cagtagagataacttccttcactatctcaatgaggaagaaataaaacgctatgatca |
| | gtttcattttgtgagtgataaagaactctatattttaagccgtatcctgctcaaaacagc |
| | actaaaaagatatcaacctgatgtctcattacaatcatggcaatttagtacgtgcaaat |
| | atggcaaaccatttatagtattcctcagttggcaaaaaagattattttaacctttcccat |
| | actatagatacagtagccgttgctattagttctcactgcgagcttggtgtcgatattga |
| | acaaataagagatttagacaactcttatctgaatatcagtcagcattatttactccaca |
| | ggaagctactaacatagtttcacttcctcgttatgaaggtcaattacttattggaaaat |
| | gtggacgctcaaagaagcttacatcaaatatcgaggtaaaggcctatctttaggact |
| | ggattgtattgaatttcatttaacaaataaaaaactaacttcaaaatatagaggttcacc |
| | tgtttatttctctcaatggaaaatatgtaactcatttctcgcattagcctctccactcatca |
| | cccctaaaataactattgagctatttcctatgcagtcccaactttatcaccacgactatc |
| | agctaattcattcgtcaaatgggcagaattgaatcgccacggataatctagacacttc |
| | tgagccgtcgataatattgattttcatattccgtcggtggtgtaagtatcccgcataatc |
| | gtgccattcacatttag |
| clbA knock-out | ggatggggggaaacatggataagttcaaagaaaaaaacccgttatctctgcgtgaaa |
| (SEQ ID NO: 351) | gacaagtattgcgcatgctggcacaaggtgatgagtactctcaaatatcacataatctt |
| | aacatatcaataaacacagtaaagtttcatgtgaaaaacatcaaacataaaatacaagc |
| | tcggaatacgaatcacgctatacacattgctaacaggaatgagattatctaaatgagga |
| | ttgaTGTGTAGGCTGGAGCTGCTTCGAAGTTCCTATAC |
| | TTTCTAGAGAATAGGAACTTCGGAATAGGAACTTCG |
| | GAATAGGAACTAAGGAGGATATTCATATGtcgtcaaatggg |
| | cagaattgaatcgccacggataatctagacacttctgagccgtcgataatattgattttc |
| | atattccgtcggtgg |

### Example 53

### Assessment of In Vitro and In Vivo Activity of Biosafety System Containing Strain

[1191] The activity of the following strains is tested:

[1192] SYN-1001 comprises a construct shown in FIG. 74C knocked into the dapA locus on the bacterial chromosome (low copy RBS; dapA::constitutive proml (BBA_J26100)-Pi(R6K)-constitutive promoter 2(P1)-Kis antitoxin). The strain further comprises a plasmid shown in FIG. 74A, except that the bla gene is replaced with the construct of FIG. 24C (OmpF-hGLP-1). On other embodiments, other inducible or constitutive promoters are used.

[1193] SYN-1002 comprises a construct shown in FIG. 74C knocked into the dapA locus on the bacterial chromosome (low copy RBS; dapA::constitutive proml (BBA_J26100)-Pi(R6K)-constitutive promoter 2(P1)-Kis antitoxin). The strain further comprises a plasmid shown in FIG. 74A, except that the bla gene is replaced with the construct of FIG. 24D (OmpF-hGLP-1). On other embodiments, other inducible or constitutive promoters are used.

[1194] SYN-1003 comprises a construct shown in FIG. 74D knocked into the dapA locus on the bacterial chromosome (medium copy RBS; dapA::constitutive proml (BBA_J26100)-Pi(R6K)-constitutive promoter 2(P1)-Kis antitoxin). The strain further comprises a plasmid shown in FIG. 74A, except that the bla gene is replaced with the construct of FIG. 24C (OmpF-hGLP-1). On other embodiments, other inducible or constitutive promoters are used.

[1195] SYN-1004 comprises a construct shown in FIG. 74D knocked into the dapA locus on the bacterial chromosome (medium copy RBS; dapA::constitutive proml (BBA_J26100)-Pi(R6K)-constitutive promoter 2(P1)-Kis antitoxin). The strain further comprises a plasmid shown in FIG. 74A, except that the bla gene is replaced with the construct of FIG. 24D (OmpF-hGLP-1). On other embodiments, other inducible or constitutive promoters are used.

[1196] SYN-1005 comprises a construct shown in FIG. 74C knocked into the thyA locus on the bacterial chromosome (low copy RBS; thyA::constitutive proml (BBA_J26100)-Pi(R6K)-constitutive promoter 2(P1)-Kis antitoxin). The strain further comprises a plasmid shown in FIG. 74B, except that the bla gene is replaced with the construct of FIG. 24C (OmpF-hGLP-1). On other embodiments, other inducible or constitutive promoters are used.

[1197] SYN-1006 comprises a construct shown in FIG. 74C knocked into the thyA locus on the bacterial chromosome (low copy RBS; thyA::constitutive proml (BBA_J26100)-Pi(R6K)-constitutive promoter 2(P1)-Kis antitoxin). The strain further comprises a plasmid shown in FIG. 74B, except that the bla gene is replaced with the construct of FIG. 24D (OmpF-hGLP-1). On other embodiments, other inducible or constitutive promoters are used.

[1198] SYN-1007 comprises a construct shown in FIG. 74D knocked into the thyA locus on the bacterial chromosome (medium copy RBS; thyA::constitutive proml (BBA_J26100)-Pi(R6K)-constitutive promoter 2(P1)-Kis antitoxin). The strain further comprises a plasmid shown in FIG. 74B, except that the bla gene is replaced with the construct of FIG. 24D (OmpF-hGLP-1). On other embodiments, other inducible or constitutive promoters are used.

[1199] SYN-1008 a construct shown in FIG. 74D knocked into the thyA locus on the bacterial chromosome (medium copy RBS; thyA::constitutive proml (BBA J26100)-Pi(R6K)-constitutive promoter 2(P1)-Kis antitoxin). The strain further comprises a plasmid shown in FIG. 74B, except that the bla gene is replaced with the construct of FIG. 24D (OmpF-hGLP-1). On other embodiments, other inducible or constitutive promoters are used.

[1200] SYN-1009 a construct shown in FIG. 74C knocked into the dapA locus on the bacterial chromosome (low copy RBS; dapA::constitutive proml (BBA_J26100)-Pi(R6K)-constitutive promoter 2(P1)-Kis antitoxin). The strain further comprises a plasmid shown in FIG. 74A, except that the bla gene is replaced with the construct of FIG. 8A (FNR-ter/pbt-buk butyrate cassette). On other embodiments, other inducible or constitutive promoters are used.

[1201] SYN-1011 comprises a construct shown in FIG. 74D knocked into the dapA locus on the bacterial chromosome (medium copy RBS; dapA::constitutive proml (BBA J26100)-Pi(R6K)-constitutive promoter 2(P1)-Kis antitoxin). The strain further comprises a plasmid shown in FIG. 74A, except that the bla gene is replaced with the construct of FIG. 8A (FNR-ter/pbt-buk butyrate cassette). On other embodiments, other inducible or constitutive promoters are used.

[1202] SYN-1013 comprises a construct shown in FIG. 74C knocked into the thyA locus on the bacterial chromosome (low copy RBS; thyA::constitutive proml (BBA J26100)-Pi(R6K)-constitutive promoter 2(P1)-Kis antitoxin). The strain further comprises a plasmid shown in FIG. 74B, except that the bla gene is replaced with the construct of FIG. 8A (FNR-ter/pbt-buk butyrate cassette). On other embodiments, other inducible or constitutive promoters are used.

[1203] SYN-1014 comprises a construct shown in FIG. 74D knocked into the thyA locus on the bacterial chromosome (medium copy RBS; thyA::constitutive proml (BBA J26100)-Pi(R6K)-constitutive promoter 2(P1)-Kis antitoxin). The strain further comprises a plasmid shown in FIG. 74B, except that the bla gene is replaced with the construct of FIG. 8A (FNR-ter/pbt-buk butyrate cassette). On other embodiments, other inducible or constitutive promoters are used.

TABLE 79
Biosafety System Constructs and Sequence Components

| | | SEQ ID |
|---|---|---|
| Description | Sequence | NO |
| Biosafety Plasmid | ACTCTTCCTTTTTCAATATTATTGAAGCATTTATCAG | 352 |
| System | GGTTATTGTCTCATGAGCGGATACATATTTGAATGT | |
| Component-dap | ATTTAGAAAAATAAACAAATAGGGGAATTAAAAAA | |
| A | AAGCCCGCTCATTAGGCGGGCTACTACCTAGGCCG | |
| Biosafety Plasmid | CGGCCGCGCGAATTCGAGCTCGGTACCCGGGGATC | |
| System Vector | CTCTAGAGTCGACCTGCAGGCATGCAAGCTTGCGG | |
| sequences, | CCGCGTCGTGACTGGGAAAACCCTGGCGACTAGTC | |
| comprising dapA, | TTGGACTCCTGTTGATAGATCCAGTAATGACCTCAG | |
| Kid Toxin and | AACTCCATCTGGATTTGTTCAGAACGCTCGGTTGCC | |
| R6K minimal on, | GCCGGGCGTTTTTTATTGGTGAGAATCCAGGGGTCC | |
| and promoter | CCAATAATTACGATTTAAATCACAGCAAACACCAC | |
| elements driving | GTCGGCCCTATCAGCTGCGTGCTTTCTATGAGTCGT | |
| expression of these | TGCTGCATAACTTGACAATTAACATCCGGCTCGTAG | |
| components, as | GGTTTGTGGAGGGCCCAAGTTCACTTAAAAAGGAG | |
| shown in FIG. | ATCAACAATGAAAGCAATTTTCGTACTGAAACATCT | |
| 74A | TAATCATGCTGGGGAGGGTTTCTAATGTTCACGGGA | |
| | AGTATTGTCGCGATTGTTACTCCGATGGATGAAAAA | |
| | GGTAATGTCTGTCGGGCTAGCTTGAAAAAACTGATT | |
| | GATTATCATGTCGCCAGCGGTACTTCGGCGATCGTT | |
| | TCTGTTGGCACCACTGGCGAGTCCGCTACCTTAAAT | |
| | CATGACGAACATGCTGATGTGGTGATGATGACGCT | |
| | GGATCTGGCTGATGGGCGCATTCCGGTAATTGCCGG | |
| | GACCGGCGCTAACGCTACTGCGGAAGCCATTAGCC | |
| | TGACGCAGCGCTTCAATGACAGTGGTATCGTCGGCT | |
| | GCCTGACGGTAACCCCTTACTACAATCGTCCGTCGC | |
| | AAGAAGGTTTGTATCAGCATTTCAAAGCCATCGCTG | |
| | AGCATACTGACCTGCCGCAAATTCTGTATAATGTGC | |
| | CGTCCCGTACTGGCTGCGATCTGCTCCCGGAAACGG | |
| | TGGGCCGTCTGGCGAAAGTAAAAAATATTATCGGA | |
| | ATCAAAGAGGCAACAGGGAACTTAACGCGTGTAAA | |
| | CCAGATCAAAGAGCTGGTTTCAGATGATTTTGTTCT | |
| | GCTGAGCGGCGATGATGCGAGCGCGCTGGACTTCA | |
| | TGCAATTGGGCGGTCATGGGGTTATTTCCGTTACGG | |
| | CTAACGTCGCAGCGCGTGATATGGCCCAGATGTGC | |
| | AAACTGGCAGCAGAAGGGCATTTTGCCGAGGCACG | |
| | CGTTATTAATCAGCGTCTGATGCCATTACACAACAA | |
| | ACTATTTGTCGAACCCAATCCAATCCCGGTGAAATG | |
| | GGCATGTAAGGAACTGGGTCTTGTGGCGACCGATA | |
| | CGCTGCGCCTGCCAATGACACCAATCACCGACAGT | |
| | GGCCGTGAGACGGTCAGAGCGGCGCTTAAACATGC | |
| | CGGTTTGCTGTAAGACTTTTGTCAGGTTCCTACTGT | |
| | GACGACTACCACCGATAGACTGGAGTGTTGCTGCG | |
| | AAAAAACCCCGCCGAAGCGGGGTTTTTTGCGAGAA | |
| | GTCACCACGATTGTGCTTTACACGGAGTAGTCGGCA | |
| | GTTCCTTAAGTCAGAATAGTGGACAGGCGGCCAAG | |
| | AACTTCGTTCATGATAGTCTCCGGAACCCGTTCGAG | |
| | TCGTTTTCCGCCCCGTGCTTTCATATCAATTGTCCGG | |
| | GGTTGATCGCAACGTACAACACCTGTGGTACGTATG | |
| | CCAACACCATCCAACGACACCGCAAAGCCGGCAGT | |
| | GCGGGCAAAATTGCCTCCGCTGGTTACGGGCACAA | |
| | CAACAGGCAGGCGGGTCACGCGATTAAAGGCCGCC | |
| | GGTGTGACAATCAGCACCGGCCGCGTTCCCTGCTGC | |
| | TCATGACCTGCGGTAGGATCAAGCGAGACAAGCCA | |
| | GATTTCCCCTCTTTCCATCTAGTATAACTATTGTTTC | |
| | TCTAGTAACATTTATTGTACAACACGAGCCCATTTT | |
| | TGTCAAATAAATTTTAAATTATATCAACGTTAATAA | |
| | GACGTTGTCAATAAAATTATTTTGACAAAATTGGCC | |
| | GGCCGGCGCGCCGATCTGAAGATCAGCAGTTCAAC | |
| | CTGTTGATAGTACGTACTAAGCTCTCATGTTTCACG | |
| | TACTAAGCTCTCATGTTTAACGTACTAAGCTCTCAT | |
| | GTTTAACGAACTAAACCCTCATGGCTAACGTACTAA | |
| | GCTCTCATGGCTAACGTACTAAGCTCTCATGTTTCA | |
| | CGTACTAAGCTCTCATGTTTGAACAATAAAATTAAT | |
| | ATAAATCAGCAACTTAAATAGCCTCTAAGGTTTTAA | |
| | GTTTTATAAGAAAAAAAAGAATATATAAGGCTTTT | |
| | AAAGCCTTTAAGGTTTAACGGTTGTGGACAACAAG | |
| | CCAGGGATGTAACGCACTGAGAAGCCCTTAGAGCC | |
| | TCTCAAAGCAATTTTGAGTGACACAGGAACACTTA | |
| | ACGGCTGACATGGGGCGCGCCCAGCTGTCTAGGGC | |
| | GGCGGATTTGTCCTACTCAGGAGAGCGTTCACCGAC | |
| | AAACAACAGATAAAACGAAAGGCCCAGTCTTTCGA | |
| | CTGAGCCTTTCGTTTTATTTGATGCCT | |
| Biosafety Plasmid | ACTCTTCCTTTTTCAATATTATTGAAGCATTTATCAG | 353 |
| System | GGTTATTGTCTCATGAGCGGATACATATTTGAATGT | |
| Component- | ATTTAGAAAAATAAACAAATAGGGGAATTAAAAAA | |
| ThyA | AAGCCCGCTCATTAGGCGGGCTACTACCTAGGCCG | |
| Bio safety Plasmid | CGGCCGCGCGAATTCGAGCTCGGTACCCGGGGATC | |
| System Vector | CTCTAGAGTCGACCTGCAGGCATGCAAGCTTGCGG | |
| sequences, | CCGCGTCGTGACTGGGAAAACCCTGGCGACTAGTC | |
| comprising ThyA, | TTGGACTCCTGTTGATAGATCCAGTAATGACCTCAG | |
| Kid Toxin and | AACTCCATCTGGATTTGTTCAGAACGCTCGGTTGCC | |
| R6K minimal on, | GCCGGGCGTTTTTTATTGGTGAGAATCCAGGGGTCC | |
| and promoter | CCAATAATTACGATTTAAATCACAGCAAACACCAC | |
| elements driving | GTCGGCCCTATCAGCTGCGTGCTTTCTATGAGTCGT | |
| expression of these | TGCTGCATAACTTGACAATTAATCATCCGGCTCGTA | |
| components, as | GGGTTTGTGGAGGGCCCAAGTTCACTTAAAAAGGA | |
| shown in FIG. | GATCAACAATGAAAGCAATTTTCGTACTGAAACAT | |
| 74B | CTTAATCATGCTGGGGAGGGTTTCTAATGAAACAGT | |
| | ATTTAGAACTGATGCAAAAAGTGCTCGACGAAGGC | |
| | ACACAGAAAAACGACCGTACCGGAACCGGAACGCT | |
| | TTCCATTTTTGGTCATCAGATGCGTTTTAACCTGCA | |
| | AGATGGATTCCCGCTGGTGACAACTAAACGTTGCC | |
| | ACCTGCGTTCCATCATCCATGAACTGCTGTGGTTTC | |
| | TTCAGGGCGACACTAACATTGCTTATCTACACGAAA | |
| | ACAATGTCACCATCTGGGACGAATGGGCCGATGAA | |
| | AACGGCGACCTCGGGCCAGTGTATGGTAAACAGTG | |
| | GCGTGCCTGGCCAACGCCAGATGGTCGTCATATTGA | |
| | CCAGATCACTACGGTACTGAACCAGCTGAAAAACG | |
| | ACCCGGATTCGCGCCGCATTATTGTTTCAGCGTGGA | |
| | ACGTAGGCGAACTGGATAAAATGGCGCTGGCACCG | |
| | TGCCATGCATTCTTCCAGTTCTATGTGGCAGACGGC | |
| | AAACTCTCTTGCCAGCTTTATCAGCGCTCCTGTGAC | |
| | GTCTTCCTCGGCCTGCCGTTCAACATTGCCAGCTAC | |
| | GCGTTATTGGTGCATATGATGGCGCAGCAGTGCGAT | |
| | CTGGAAGTGGGTGATTTTGTCTGGACCGGTGGCGAC | |
| | ACGCATCTGTACAGCAACCATATGGATCAAACTCAT | |
| | CTGCAATTAAGCCGCGAACCGCGTCCGCTGCCGAA | |
| | GTTGATTATCAAACGTAAACCCGAATCCATCTTCGA | |
| | CTACCGTTTCGAAGACTTTGAGATTGAAGGCTACGA | |
| | TCCGCATCCGGGCATTAAAGCGCCGGTGGCTATCTA | |
| | AGACTTTTGTCAGGTTCCTACTGTGACGACTACCAC | |
| | CGATAGACTGGAGTGTTGCTGCGAAAAAACCCCGC | |
| | CGAAGCGGGGTTTTTTGCGAGAAGTCACCACGATT | |
| | GTGCTTTACACGGAGTAGTCGGCAGTTCCTTAAGTC | |
| | AGAATAGTGGACAGGCGGCCAAGAACTTCGTTCAT | |
| | GATAGTCTCCGGAACCCGTTCGAGTCGTTTTCCGCC | |
| | CCGTGCTTTCATATCAATTGTCCGGGGTTGATCGCA | |
| | ACGTACAACACCTGTGGTACGTATGCCAACACCATC | |
| | CAACGACACCGCAAAGCCGGCAGTGCGGGCAAAAT | |
| | TGCCTCCGCTGGTTACGGGCACAACAACAGGCAGG | |
| | CGGGTCACGCGATTAAAGGCCGCCGGTGTGACAAT | |
| | CAGCACCGGCCGCGTTCCCTGCTGCTCATGACCTGC | |
| | GGTAGGATCAAGCGAGACAAGCCAGATTTCCCCTC | |
| | TTTCCATCTAGTATAACTATTGTTTCTCTAGTAACAT | |
| | TTATTGTACAACACGAGCCCATTTTTGTCAAATAAA | |
| | TTTTAAATTATATCAACGTTAATAAGACGTTGTCAA | |
| | TAAAATTATTTTGACAAAATTGGCCGGCCGGCGCGC | |
| | CGATCTGAAGATCAGCAGTTCAACCTGTTGATAGTA | |
| | CGTACTAAGCTCTCATGTTTCACGTACTAAGCTCTC | |
| | ATGTTTAACGTACTAAGCTCTCATGTTTAACGAACT | |
| | AAACCCTCATGGCTAACGTACTAAGCTCTCATGGCT | |
| | AACGTACTAAGCTCTCATGTTTCACGTACTAAGCTC | |
| | TCATGTTTGAACAATAAAATTAATATAAATCAGCAA | |
| | CTTAAATAGCCTCTAAGGTTTTAAGTTTTATAAGAA | |
| | AAAAAAGAATATATAAGGCTTTTAAAGCCTTTAAG | |
| | GTTTAACGGTTGTGGACAACAAGCCAGGGATGTAA | |
| | CGCACTGAGAAGCCCTTAGAGCCTCTCAAAGCAAT | |
| | TTTGAGTGACACAGGAACACTTAACGGCTGACATG | |
| | GGGCGCGCCCAGCTGTCTAGGGCGGCGGATTTGTC | |
| | CTACTCAGGAGAGCGTTCACCGACAAACAACAGAT | |
| | AAAACGAAAGGCCCAGTCTTTCGACTGAGCCTTTCG | |
| | TTTTATTTGATGCCT | |
| Kid toxin (reverse | TTAAGTCAGAATAGTGGACAGGCGGCCAAGAACTT | 354 |
| orientation) | CGTTCATGATAGTCTCCGGAACCCGTTCGAGTCGTT | |
| | TTCCGCCCCGTGCTTTCATATCAATTGTCCGGGGTT | |
| | GATCGCAACGTACAACACCTGTGGTACGTATGCCA | |
| | ACACCATCCAACGACACCGCAAAGCCGGCAGTGCG | |
| | GGCAAAATTGCCTCCGCTGGTTACGGGCACAACAA | |
| | CAGGCAGGCGGGTCACGCGATTAAAGGCCGCCGGT | |
| | GTGACAATCAGCACCGGCCGCGTTCCCTGCTGCTCA | |
| | TGACCTGCGGTAGGATCAAGCGAGACAAGCCAGAT | |
| | TTCCCCTCTTTCCAT | |
| dapA | ATGTTCACGGGAAGTATTGTCGCGATTGTTACTCCG | 355 |
| | ATGGATGAAAAAGGTAATGTCTGTCGGGCTAGCTT | |
| | GAAAAAACTGATTGATTATCATGTCGCCAGCGGTA | |
| | CTTCGGCGATCGTTTCTGTTGGCACCACTGGCGAGT | |
| | CCGCTACCTTAAATCATGACGAACATGCTGATGTGG | |
| | TGATGATGACGCTGGATCTGGCTGATGGGCGCATTC | |
| | CGGTAATTGCCGGGACCGGCGCTAACGCTACTGCG | |
| | GAAGCCATTAGCCTGACGCAGCGCTTCAATGACAG | |
| | TGGTATCGTCGGCTGCCTGACGGTAACCCCTTACTA | |
| | CAATCGTCCGTCGCAAGAAGGTTTGTATCAGCATTT | |
| | CAAAGCCATCGCTGAGCATACTGACCTGCCGCAAA | |
| | TTCTGTATAATGTGCCGTCCCGTACTGGCTGCGATC | |
| | TGCTCCCGGAAACGGTGGGCCGTCTGGCGAAAGTA | |
| | AAAAATATTATCGGAATCAAAGAGGCAACAGGGAA | |
| | CTTAACGCGTGTAAACCAGATCAAAGAGCTGGTTTC | |
| | AGATGATTTTGTTCTGCTGAGCGGCGATGATGCGAG | |
| | CGCGCTGGACTTCATGCAATTGGGCGGTCATGGGGT | |
| | TATTTCCGTTACGGCTAACGTCGCAGCGCGTGATAT | |
| | GGCCCAGATGTGCAAACTGGCAGCAGAAGGGCATT | |
| | TTGCCGAGGCACGCGTTATTAATCAGCGTCTGATGC | |
| | CATTACACAACAAACTATTTGTCGAACCCAATCCAA | |
| | TCCCGGTGAAATGGGCATGTAAGGAACTGGGTCTT | |
| | GTGGCGACCGATACGCTGCGCCTGCCAATGACACC | |
| | AATCACCGACAGTGGCCGTGAGACGGTCAGAGCGG | |
| | CGCTTAAACATGCCGGTTTGCTGTAA | |
| thyA | ATGAAACAGTATTTAGAACTGATGCAAAAAGTGCT | 356 |
| | CGACGAAGGCACACAGAAAAACGACCGTACCGGA | |
| | ACCGGAACGCTTTCCATTTTTGGTCATCAGATGCGT | |
| | TTTAACCTGCAAGATGGATTCCCGCTGGTGACAACT | |
| | AAACGTTGCCACCTGCGTTCCATCATCCATGAACTG | |
| | CTGTGGTTTCTTCAGGGCGACACTAACATTGCTTAT | |
| | CTACACGAAAACAATGTCACCATCTGGGACGAATG | |
| | GGCCGATGAAAACGGCGACCTCGGGCCAGTGTATG | |
| | GTAAACAGTGGCGTGCCTGGCCAACGCCAGATGGT | |
| | CGTCATATTGACCAGATCACTACGGTACTGAACCAG | |
| | CTGAAAAACGACCCGGATTCGCGCCGCATTATTGTT | |
| | TCAGCGTGGAACGTAGGCGAACTGGATAAAATGGC | |
| | GCTGGCACCGTGCCATGCATTCTTCCAGTTCTATGT | |
| | GGCAGACGGCAAACTCTCTTGCCAGCTTTATCAGCG | |
| | CTCCTGTGACGTCTTCCTCGGCCTGCCGTTCAACAT | |
| | TGCCAGCTACGCGTTATTGGTGCATATGATGGCGCA | |
| | GCAGTGCGATCTGGAAGTGGGTGATTTTGTCTGGAC | |
| | CGGTGGCGACACGCATCTGTACAGCAACCATATGG | |
| | ATCAAACTCATCTGCAATTAAGCCGCGAACCGCGTC | |
| | CGCTGCCGAAGTTGATTATCAAACGTAAACCCGAA | |
| | TCCATCTTCGACTACCGTTTCGAAGACTTTGAGATT | |
| | GAAGGCTACGATCCGCATCCGGGCATTAAAGCGCC | |
| | GGTGGCTATCTAA | |
| Kid toxin | MERGEIWLVSLDPTAGHEQQGTRPVLIVTPAAFNRVT | 357 |
| polypeptide | RLPVVVPVTSGGNFARTAGFAVSLDGVGIRTTGVVRC | |
| | DQPRTIDMKARGGKRLERVPETIMNEVLGRLSTILT* | |
| dapA polypeptide | MFTGSIVAIVTPMDEKGNVCRASLKKLIDYHVASGTS | 358 |
| | AIVSVGTTGESATLNHDEHADVVMMTLDLADGRIPVI | |
| | AGTGANATAEAISLTQRFNDSGIVGCLTVTPYYNRPS | |
| | QEGLYQHFKAIAEHTDLPQILYNVPSRTGCDLLPETVG | |
| | RLAKVKNIIGIKEATGNLTRVNQIKELVSDDFVLLSGD | |
| | DASALDFMQLGGHGVISVTANVAARDMAQMCKLAA | |
| | EGHFAEARVINQRLMPLHNKLFVEPNPIPVKWACKEL | |
| | GLVATDTLRLPMTPITDSGRETVRAALKHAGLL | |
| ThyA polypeptide | MKQYLELMQKVLDEGTQKNDRTGTGTLSIFGHQMRF | 359 |
| | NLQDGFPLVTTKRCHLRSIIHELLWFLQGDTNIAYLHE | |
| | NNVTIWDEWADENGDLGPVYGKQWRAWPTPDGRHI | |
| | DQITTVLNQLKNDPDSRRIIVSAWNVGELDKMALAPC | |
| | HAFFQFYVADGKLSCQLYQRSCDVFLGLPFNIASYAL | |
| | LVHMMAQQCDLEVGDFVWTGGDTHLYSNHMDQTH | |
| | LQLSREPRPLPKLIIKRKPESIFDYRFEDFEIEGYDPHPG | |
| | IKAPVAI* | |

TABLE 80
Chromosomally Inserted Biosafety System Constructs

| | | SEQ |
|---|---|---|
| | | ID |
| Description | Sequence | NO |
| Biosafety | TTGACGGCTAGCTCAGTCCTAGGTACAGTGCTAGCGGAT | 360 |
| Chromosomal | CTGCTGGAACAGGTGGTGAGACTCAAGGTCATGATGGA | |
| Construct-low | CGTGAACAAAAAAACGAAAATTCGCCACCGAAACGAGC | |
| copy Rep (Pi) | TAAATCACACCCTGGCTCAACTTCCTTTGCCCGCAAAGC | |
| and Kis antitoxin | GAGTGATGTATATGGCGCTTGCTCCCATTGATAGCAAAG | |
| (as shown in | AACCTCTTGAACGAGGGCGAGTTTTCAAAATTAGGGCTG | |
| FIG. 74C) | AAGACCTTGCAGCGCTCGCCAAAATCACCCCATCGCTTG | |
| | CTTATCGACAATTAAAAGAGGGTGGTAAATTACTTGGTG | |
| | CCAGCAAAATTTCGCTAAGAGGGGATGATATCATTGCTT | |
| | TAGCTAAAGAGCTTAACCTGCTCTTTACTGCTAAAAACT | |
| | CCCCTGAAGAGTTAGACCTTAACATTATTGAGTGGATAG | |
| | CTTATTCAAATGATGAAGGATACTTGTCTTTAAAATTCA | |
| | CCAGAACCATAGAACCATATATCTCTAGCCTTATTGGGA | |
| | AAAAAAATAAATTCACAACGCAATTGTTAACGGCAAGC | |
| | TTACGCTTAAGTAGCCAGTATTCATCTTCTCTTTATCAAC | |
| | TTATCAGGAAGCATTACTCTAATTTTAAGAAGAAAAATT | |
| | ATTTTATTATTTCCGTTGATGAGTTAAAGGAAGAGTTAA | |
| | TAGCTTATACTTTTGATAAAGATGGAAATATTGAGTACA | |
| | AATACCCTGACTTTCCTATTTTTAAAAGGGATGTGTTAA | |
| | ATAAAGCCATTGCTGAAATTAAAAAGAAAACAGAAATA | |
| | TCGTTTGTTGGCTTCACTGTTCATGAAAAAGAAGGAAGA | |
| | AAAATTAGTAAGCTGAAGTTCGAATTTGTCGTTGATGAA | |
| | GATGAATTTTCTGGCGATAAAGATGATGAAGCTTTTTTT | |
| | ATGAATTTATCTGAAGCTGATGCAGCTTTTCTCAAGGTA | |
| | TTTGATGAAACCGTACCTCCCAAAAAAGCTAAGGGGTGA | |
| | GGATCTCCAGGCATCAAATAAAACGAAAGGCTCAGTCG | |
| | AAAGACTGGGCCTTTCGTTTTATCTGTTGTTTGTCGGTGA | |
| | ACGCTCTCTACTAGAGTCACACTGGCTCACCTTCGGGTG | |
| | GGCCTTTCTGCGTTTATACCCGGGAAAAAGAGTATTGAC | |
| | TtaaagtctaacctataggTATAATGTGTGGAGACCAGAGGTAAGG | |
| | AGGTAACAACCATGCGAGTGTTGAAGAAACATCTTAATC | |
| | ATGCTAAGGAGGTTTTCTAATGCATACCACCCGACTGAA | |
| | GAGGGTTGGCGGCTCAGTTATGCTGACCGTCCCACCGGC | |
| | ACTGCTGAATGCGCTGTCTCTGGGCACAGATAATGAAGT | |
| | TGGCATGGTCATTGATAATGGCCGGCTGATTGTTGAGCC | |
| | GTACAGACGCCCGCAATATTCACTGGCTGAGCTACTGGC | |
| | ACAGTGTGATCCGAATGCTGAAATATCAGCTGAAGAAC | |
| | GAGAATGGCTGGATGCACCGGCGACTGGTCAGGAGGAA | |
| | ATCTGA | |
| Biosafety | TTGACGGCTAGCTCAGTCCTAGGTACAGTGCTAGCGGAT | 361 |
| Chromosomal | CTTCCGGAAGACTAGGTGAGACTCAAGGTCATGATGGAC | |
| Construct- | GTGAACAAAAAAACGAAAATTCGCCACCGAAACGAGCT | |
| medium copy | AAATCACACCCTGGCTCAACTTCCTTTGCCCGCAAAGCG | |
| Rep (Pi) and Kis | AGTGATGTATATGGCGCTTGCTCCCATTGATAGCAAAGA | |
| antitoxin (as | ACCTCTTGAACGAGGGCGAGTTTTCAAAATTAGGGCTGA | |
| shown in FIG. | AGACCTTGCAGCGCTCGCCAAAATCACCCCATCGCTTGC | |
| 74D) | TTATCGACAATTAAAAGAGGGTGGTAAATTACTTGGTGC | |
| | CAGCAAAATTTCGCTAAGAGGGGATGATATCATTGCTTT | |
| | AGCTAAAGAGCTTAACCTGCTCTTTACTGCTAAAAACTC | |
| | CCCTGAAGAGTTAGACCTTAACATTATTGAGTGGATAGC | |
| | TTATTCAAATGATGAAGGATACTTGTCTTTAAAATTCAC | |
| | CAGAACCATAGAACCATATATCTCTAGCCTTATTGGGAA | |
| | AAAAAATAAATTCACAACGCAATTGTTAACGGCAAGCTT | |
| | ACGCTTAAGTAGCCAGTATTCATCTTCTCTTTATCAACTT | |
| | ATCAGGAAGCATTACTCTAATTTTAAGAAGAAAAATTAT | |
| | TTTATTATTTCCGTTGATGAGTTAAAGGAAGAGTTAATA | |
| | GCTTATACTTTTGATAAAGATGGAAATATTGAGTACAAA | |
| | TACCCTGACTTTCCTATTTTTAAAAGGGATGTGTTAAATA | |
| | AAGCCATTGCTGAAATTAAAAAGAAAACAGAAATATCG | |
| | TTTGTTGGCTTCACTGTTCATGAAAAAGAAGGAAGAAAA | |
| | ATTAGTAAGCTGAAGTTCGAATTTGTCGTTGATGAAGAT | |
| | GAATTTTCTGGCGATAAAGATGATGAAGCTTTTTTTATG | |
| | AATTTATCTGAAGCTGATGCAGCTTTTCTCAAGGTATTTG | |
| | ATGAAACCGTACCTCCCAAAAAAGCTAAGGGGTGAGGA | |
| | TCTCCAGGCATCAAATAAAACGAAAGGCTCAGTCGAAA | |
| | GACTGGGCCTTTCGTTTTATCTGTTGTTTGTCGGTGAACG | |
| | CTCTCTACTAGAGTCACACTGGCTCACCTTCGGGTGGGC | |
| | CTTTCTGCGTTTATACCCGGGAAAAAGAGTATTGACTtaaa | |
| | gtctaacctataggTATAATGTGTGGAGACCAGAGGTAAGGAGG | |
| | TAACAACCATGCGAGTGTTGAAGAAACATCTTAATCATG | |
| | CTAAGGAGGTTTTCTAATGCATACCACCCGACTGAAGAG | |
| | GGTTGGCGGCTCAGTTATGCTGACCGTCCCACCGGCACT | |
| | GCTGAATGCGCTGTCTCTGGGCACAGATAATGAAGTTGG | |
| | CATGGTCATTGATAATGGCCGGCTGATTGTTGAGCCGTA | |
| | CAGACGCCCGCAATATTCACTGGCTGAGCTACTGGCACA | |
| | GTGTGATCCGAATGCTGAAATATCAGCTGAAGAACGAG | |
| | AATGGCTGGATGCACCGGCGACTGGTCAGGAGGAAATC | |
| | TGA | |
| Rep (Pi) | TGAGACTCAAGGTCATGATGGACGTGAACAAAAAAACG | 362 |
| | AAAATTCGCCACCGAAACGAGCTAAATCACACCCTGGCT | |
| | CAACTTCCTTTGCCCGCAAAGCGAGTGATGTATATGGCG | |
| | CTTGCTCCCATTGATAGCAAAGAACCTCTTGAACGAGGG | |
| | CGAGTTTTCAAAATTAGGGCTGAAGACCTTGCAGCGCTC | |
| | GCCAAAATCACCCCATCGCTTGCTTATCGACAATTAAAA | |
| | GAGGGTGGTAAATTACTTGGTGCCAGCAAAATTTCGCTA | |
| | AGAGGGGATGATATCATTGCTTTAGCTAAAGAGCTTAAC | |
| | CTGCTCTTTACTGCTAAAAACTCCCCTGAAGAGTTAGAC | |
| | CTTAACATTATTGAGTGGATAGCTTATTCAAATGATGAA | |
| | GGATACTTGTCTTTAAAATTCACCAGAACCATAGAACCA | |
| | TATATCTCTAGCCTTATTGGGAAAAAAAATAAATTCACA | |
| | ACGCAATTGTTAACGGCAAGCTTACGCTTAAGTAGCCAG | |
| | TATTCATCTTCTCTTTATCAACTTATCAGGAAGCATTACT | |
| | CTAATTTTAAGAAGAAAAATTATTTTATTATTTCCGTTGA | |
| | TGAGTTAAAGGAAGAGTTAATAGCTTATACTTTTGATAA | |
| | AGATGGAAATATTGAGTACAAATACCCTGACTTTCCTAT | |
| | TTTTAAAAGGGATGTGTTAAATAAAGCCATTGCTGAAAT | |
| | TAAAAAGAAAACAGAAATATCGTTTGTTGGCTTCACTGT | |
| | TCATGAAAAAGAAGGAAGAAAAATTAGTAAGCTGAAGT | |
| | TCGAATTTGTCGTTGATGAAGATGAATTTTCTGGCGATA | |
| | AAGATGATGAAGCTTTTTTTATGAATTTATCTGAAGCTG | |
| | ATGCAGCTTTTCTCAAGGTATTTGATGAAACCGTACCTC | |
| | CCAAAAAAGCTAAGGGGTGA | |
| Kis antitoxin | CATACCACCCGACTGAAGAGGGTTGGCGGCTCAGTTATG | 363 |
| | CTGACCGTCCCACCGGCACTGCTGAATGCGCTGTCTCTG | |
| | GGCACAGATAATGAAGTTGGCATGGTCATTGATAATGGC | |
| | CGGCTGATTGTTGAGCCGTACAGACGCCCGCAATATTCA | |
| | CTGGCTGAGCTACTGGCACAGTGTGATCCGAATGCTGAA | |
| | ATATCAGCTGAAGAACGAGAATGGCTGGATGCACCGGC | |
| | GACTGGTCAGGAGGAAATCTGA | |
| RBS (low copy) | GCTGGAACAGGTGG | 364 |
| RBS (medium | TCCGGAAGACTAGG | 365 |
| copy) | | |

The application's sequence listing, which the Patent Office published only in electronic form, follows.

SEQUENCE LISTING (368 sequences)

SEQ ID NO: 1 - DNA, 1575 bp, Artificial Sequence
  Synthetic
atgcgcaaagtgccgattatcacggctgacgaggccgcaaaactgatcaaggacggcgacaccgtgacaactagcggctttgtgggtaacgcgatccctgaggcccttgaccgtgcagtcgaaaagcgtttcctggaaacgggcgaaccgaagaacattacttatgtatattgcggcagtcagggcaatcgcgacggtcgtggcgcagaacatttcgcgcatgaaggcctgctgaaacgttatatcgctggccattgggcgaccgtcccggcgttagggaaaatggccatggagaataaaatggaggcctacaatgtctctcagggcgccttgtgtcatctctttcgcgatattgcgagccataaaccgggtgtgttcacgaaagtaggaatcggcaccttcattgatccacgtaacggtggtgggaaggtcaacgatattaccaaggaagatatcgtagaactggtggaaattaaagggcaggaatacctgttttatccggcgttcccgatccatgtcgcgctgattcgtggcacctatgcggacgagagtggtaacatcacctttgaaaaagaggtagcgcctttggaagggacttctgtctgtcaagcggtgaagaactcgggtggcattgtcgtggttcaggttgagcgtgtcgtcaaagcaggcacgctggatccgcgccatgtgaaagttccgggtatctatgtagattacgtagtcgtcgcggatccggaggaccatcaacagtcccttgactgcgaatatgatcctgcccttagtggagagcaccgtcgtccggaggtggtgggtgaaccactgcctttatccgcgaagaaagtcatcggccgccgtggcgcgattgagctcgagaaagacgttgcagtgaaccttggggtaggtgcacctgagtatgtggcctccgtggccgatgaagaaggcattgtggattttatgactctcacagcggagtccggcgctatcggtggcgttccagccggcggtgttcgctttggggcgagctacaatgctgacgccttgatcgaccagggctaccaatttgattattacgacggtgggggtctggatctttgttacctgggtttagctgaatgcgacgaaaagggtaatatcaatgttagccgcttcggtcctcgtatcgctgggtgcggcggattcattaacattacccaaaacacgccgaaagtcttcttttgtgggacctttacagccggggggctgaaagtgaaaattgaagatggtaaggtgattatcgttcaggaagggaaacagaagaaattccttaaggcagtggagcaaatcacctttaatggagacgtggccttagcgaacaagcaacaagttacctacatcacggagcgttgcgtcttcctcctcaaagaagacggtttacacctttcggaaatcgcgccaggcatcgatctgcagacccagattttggatgttatggactttgccccgatcattgatcgtgacgcaaacgggcagattaaactgatggacgcggcgttattcgcagaagggctgatgggcttgaaagaaatgaagtcttaa

SEQ ID NO: 2 - DNA, 1269 bp, Artificial Sequence
  Synthetic
atgagcttaacccaaggcatgaaagctaaacaactgttagcatactttcagggtaaagccgatcaggatgcacgtgaagcgaaagcccgcggtgagctggtctgctggtcggcgtcagtcgcgccgccggaattttgcgtaacaatgggcattgccatgatctacccggagactcatgcagcgggcatcggtgcccgcaaaggtgcgatggacatgctggaagttgcggaccgcaaaggctacaacgtggattgttgttcctacggccgtgtaaatatgggttacatggaatgtttaaaagaagccgccatcacgggcgtcaagccggaagttttggttaattcccctgctgctgacgttccgcttcccgatttggtgattacgtgtaataatatctgtaacacgctgctgaaatggtacgaaaacttagcagcagaactcgatattccttgcatcgtgatcgacgtaccgtttaatcataccatgccgattccggaatatgccaaggcctacatcgcggaccagttccgcaatgcaatttctcagctggaagttatttgtggccgtccgttcgattggaagaaatttaaggaggtcaaagatcagacccagcgtagcgtataccactggaaccgcattgccgagatggcgaaatacaagcctagcccgctgaacggcttcgatctgttcaattacatggcgttaatcgtggcgtgccgcagcctggattatgcagaaattacctttaaagcgttcgcggacgaattagaagagaatttgaaggcgggtatctacgcctttaaaggtgcggaaaaaacgcgctttcaatgggaaggtatcgcggtgtggccacatttaggtcacacgtttaaatctatgaagaatctgaattcgattatgaccggtacggcataccccgccctttgggacctgcactatgacgctaacgacgaatctatgcactctatggctgaagcgtacacccgtatttatattaatacttgtctgcagaacaaagtagaggtcctgcttgggatcatggaaaaaggccaggtggatggtaccgtatatcatctgaatcgcagctgcaaactgatgagtttcctgaacgtggaaacggctgaaattattaaagagaagaacggtcttccttacgtctccattgatggcgatcagaccgatcctcgcgttttttctccggcccagtttgatacccgtgttcaggccctggttgagatgatggaggccaatatggcggcagcggaataa

SEQ ID NO: 3 - DNA, 1125 bp, Artificial Sequence
  Synthetic
atgtcacgcgtggaggcaatcctgtcgcagctgaaagatgtcgccgcgaatccgaaaaaagccatggatgactataaagctgaaacaggtaagggcgcggttggtatcatgccgatctacagccccgaagaaatggtacacgccgctggctatttgccgatgggaatctggggcgcccagggcaaaacgattagtaaagcgcgcacctatctgcctgcttttgcctgcagcgtaatgcagcaggttatggaattacagtgcgagggcgcgtatgatgacctgtccgcagttatttttagcgtaccgtgcgacactctcaaatgtcttagccagaaatggaaaggtacgtccccagtgattgtatttacgcatccgcagaaccgcggattagaagcggcgaaccaattcttggttaccgagtatgaactggtaaaagcacaactggaatcagttctgggtgtgaaaatttcaaacgccgccctggaaaattcgattgcaatttataacgagaatcgtgccgtgatgcgtgagttcgtgaaagtggcagcggactatcctcaagtcattgacgcagtgagccgccacgcggtttttaaagcgcgccagtttatgcttaaggaaaaacataccgcacttgtgaaagaactgatcgctgagattaaagcaacgccagtccagccgtgggacggaaaaaaggttgtagtgacgggcattctgttggaaccgaatgagttattagatatctttaatgagtttaagatcgcgattgttgatgatgatttagcgcaggaaagccgtcagatccgtgttgacgttctggacggagaaggcggaccgctctaccgtatggctaaagcgtggcagcaaatgtatggctgctcgctggcaaccgacaccaagaagggtcgcggccgtatgttaattaacaaaacgattcagaccggtgcggacgctatcgtagttgcaatgatgaagttttgcgacccagaagaatgggattatccggtaatgtaccgtgaatttgaagaaaaaggggtcaaatcacttatgattgaggtggatcaggaagtatcgtctttcgaacagattaaaacccgtctgcagtcattcgtcgaaatgctttaa

SEQ ID NO: 4 - DNA, 779 bp, Artificial Sequence
  Synthetic
atgtataccttggggattgatgtcggttctgcctctagtaaagcggtgattctgaaagatggaaaagatattgtcgctgccgaggttgtccaagtcggtaccggctcctcgggtccccaacgcgcactggacaaagcctttgaagtctctggcttaaaaaaggaagacatcagctacacagtagctacgggctatgggcgcttcaattttagcgacgcggataaacagatttcggaaattagctgtcatgccaaaggcatttatttcttagtaccaactgcgcgcactattattgacattggcggccaagatgcgaaagccatccgcctggacgacaaggggggtattaagcaattcttcatgaatgataaatgcgcggcgggcacggggcgtttcctggaagtcatggctcgcgtacttgaaaccaccctggatgaaatggctgaactggatgaacaggcgactgacaccgctcccatttcaagcacctgcacggttttcgccgaaagcgaagtaattagccaattgagcaatggtgtctcacgcaacaacatcattaaaggtgtccatctgagcgttgcgtcacgtgcgtgtggtctggcgtatcgcggcggtttggagaaagatgttgttatgacaggtggcgtggcaaaaaatgcaggggtggtgcgcgcggtggcgggcgttctgaagaccgatgttatcgttgctccgaatcctcagacgaccggtgcactgggggcagcgctgtatgcttatgaggccgcccagaagaagta

SEQ ID NO: 5 - DNA, 1104 bp, Artificial Sequence
  Synthetic
atggccttcaatagcgcagatattaattctttccgcgatatttgggtgttttgtgaacagcgtgagggcaaactgattaacaccgatttcgaattaattagcgaaggtcgtaaactggctgacgaacgcggaagcaaactggttggaattttgctggggcacgaagttgaagaaatcgcaaaagaattaggcggctatggtgcggacaaggtaattgtgtgcgatcatccggaacttaaattttacactacggatgcttatgccaaagttttatgtgacgtcgtgatggaagagaaaccggaggtaattttgatcggtgccaccaacattggccgtgatctcggaccgcgttgtgctgcacgcttgcacacggggctgacggctgattgcacgcacctggatattgatatgaataaatatgtggactttcttagcaccagtagcaccttggatatctcgtcgatgactttccctatggaagatacaaaccttaaaatgacgcgccctgcatttggcggacatctgatggcaacgatcatttgtccacgcttccgtccctgtatgagcacagtgcgccccggagtgatgaagaaagcggagttctcgcaggagatggcgcaagcatgtcaagtagtgacccgtcacgtaaatttgtcggatgaagaccttaaaactaaagtaattaatatcgtgaaggaaacgaaaaagattgtggatctgatcggcgcagaaattattgtgtcagttggtcgtggtatctcgaaagatgtccaaggtggaattgcactggctgaaaaacttgcggacgcatttggtaacggtgtcgtgggcggctcgcgcgcagtgattgattccggctggttacctgcggatcatcaggttggacaaaccggtaagaccgtgcacccgaaagtctacgtggcgctgggtattagtggggctatccagcataaggctgggatgcaagactctgaactgatcattgccgtcaacaaagacgaaacggcgcctatcttcgactgcgccgattatggcatcaccggtgatttatttaaaatcgtaccgatgatgatcgacgcgatcaaagagggtaaaaacgcatga

SEQ ID NO: 6 - DNA, 804 bp, Artificial Sequence
  Synthetic
atgcgcatctatgtgtgtgtgaaacaagtcccagatacgagcggcaaggtggccgttaaccctgatgggacccttaaccgtgcctcaatggcagcgattattaacccggacgatatgtccgcgatcgaacaggcattaaaactgaaagatgaaaccggatgccaggttacggcgcttacgatgggtcctcctcctgccgagggcatgttgcgcgaaattattgcaatgggggccgacgatggtgtgctgatttcggcccgtgaatttggggggtccgataccttcgcaaccagtcaaattattagcgcggcaatccataaattaggcttaagcaatgaagacatgatcttttgcggtcgtcaggccattgacggtgatacggcccaagtcggccctcaaattgccgaaaaactgagcatcccacaggtaacctatggcgcaggaatcaaaaaatctggtgatttagtgctggtgaagcgtatgttggaggatggttatatgatgatcgaagtcgaaactccatgtctgattacctgcattcaggataaagcggtaaaaccacgttacatgactctcaacggtattatggaatgctactccaagccgctcctcgttctcgattacgaagcactgaaagatgaaccgctgatcgaacttgataccattgggcttaaaggctccccgacgaatatctttaaatcgtttacgccgcctcagaaaggcgttggtgtcatgctccaaggcaccgataaggaaaaagtcgaggatctggtggataagctgatgcagaaacatgtcatctaa

SEQ ID NO: 7 - DNA, 1185 bp, Artificial Sequence
  Synthetic
atgttcttactgaagattaaaaaagaacgtatgaaacgcatggactttagtttaacgcgtgaacaggagatgttaaaaaaactggcgcgtcagtttgctgagatcgagctggaaccggtggccgaagagattgatcgtgagcacgtttttcctgcagaaaactttaagaagatggcggaaattggcttaaccggcattggtatcccgaaagaatttggtggctccggtggaggcaccctggagaaggtcattgccgtgtcagaattcggcaaaaagtgtatggcctcagcttccattttaagcattcatcttatcgcgccgcaggcaatctacaaatatgggaccaaagaacagaaagagacgtacctgccgcgtcttaccaaaggtggtgaactgggcgcctttgcgctgacagaaccaaacgccggaagcgatgccggcgcggtaaaaacgaccgcgattctggacagccagacaaacgagtacgtgctgaatggcaccaaatgctttatcagcgggggcgggcgcgcgggtgttcttgtaatttttgcgcttactgaaccgaaaaaaggtctgaaagggatgagcgcgattatcgtggagaaagggaccccgggcttcagcatcggcaaggtggagagcaagatggggatcgcaggttcggaaaccgcggaacttatcttcgaagattgtcgcgttccggctgccaaccttttaggtaaagaaggcaaaggctttaaaattgctatggaagccctggatggcgcccgtattggcgtgggcgctcaagcaatcggaattgccgagggggcgatcgacctgagtgtgaagtacgttcacgagcgcattcaatttggtaaaccgatcgcgaatctgcagggaattcaatggtatatcgcggatatggcgaccaaaaccgccgcggcacgcgcacttgttgagtttgcagcgtatcttgaagacgcgggtaaaccgttcacaaaggaatctgctatgtgcaagctgaacgcctccgaaaacgcgcgttttgtgacaaatttagctctgcagattcacgggggttacggttatatgaaagattatccgttagagcgtatgtatcgcgatgctaagattacggaaatttacgaggggacatcagaaatccataaggtggtgattgcgcgtgaagtaatgaaacgctaa

SEQ ID NO: 8 - DNA, 2463 bp, Artificial Sequence
  Synthetic
atgcgagtgttgaagttcggcggtacatcagtggcaaatgcagaacgttttctgcgtgttgccgatattctggaaagcaatgccaggcaggggcaggtggccaccgtcctctctgcccccgccaaaatcaccaaccacctggtggcgatgattgaaaaaaccattagcggccaggatgctttacccaatatcagcgatgccgaacgtatttttgccgaacttttgacgggactcgccgccgcccagccggggttcccgctggcgcaattgaaaactttcgtcgatcaggaatttgcccaaataaaacatgtcctgcatggcattagtttgttggggcagtgcccggatagcatcaacgctgcgctgatttgccgtggcgagaaaatgtcgatcgccattatggccggcgtattagaagcgcgcggtcacaacgttactgttatcgatccggtcgaaaaactgctggcagtggggcattacctcgaatctaccgtcgatattgctgagtccacccgccgtattgcggcaagccgcattccggctgatcacatggtgctgatggcaggtttcaccgccggtaatgaaaaaggcgaactggtggtgcttggacgcaacggttccgactactctgctgcggtgctggctgcctgtttacgcgccgattgttgcgagatttggacggacgttgacggggtctatacctgcgacccgcgtcaggtgcccgatgcgaggttgttgaagtcgatgtcctaccaggaagcgatggagctttcctacttcggcgctaaagttcttcacccccgcaccattacccccatcgcccagttccagatcccttgcctgattaaaaataccggaaatcctcaagcaccaggtacgctcattggtgccagccgtgatgaagacgaattaccggtcaagggcatttccaatctgaataacatggcaatgttcagcgtttctggtccggggatgaaagggatggtcggcatggcggcgcgcgtctttgcagcgatgtcacgcgcccgtatttccgtggtgctgattacgcaatcatcttccgaatacagcatcagtttctgcgttccacaaagcgactgtgtgcgagctgaacgggcaatgcaggaagagttctacctggaactgaaagaaggcttactggagccgctggcagtgacggaacggctggccattatctcggtggtaggtgatggtatgcgcaccttgcgtgggatctcggcgaaattctttgccgcactggcccgcgccaatatcaacattgtcgccattgctcagagatcttctgaacgctcaatctctgtcgtggtaaataacgatgatgcgaccactggcgtgcgcgttactcatcagatgctgttcaataccgatcaggttatcgaagtgtttgtgattggcgtcggtggcgttggcggtgcgctgctggagcaactgaagcgtcagcaaagctggctgaagaataaacatatcgacttacgtgtctgcggtgttgccaactcgaaggctctgctcaccaatgtacatggccttaatctggaaaactggcaggaagaactggcgcaagccaaagagccgtttaatctcgggcgcttaattcgcctcgtgaaagaatatcatctgctgaacccggtcattgttgactgcacttccagccaggcagtggcggatcaatatgccgacttcctgcgcgaaggtttccacgttgtcacgccgaacaaaaaggccaacacctcgtcgatggattactaccatcagttgcgttatgcggcggaaaaatcgcggcgtaaattcctctatgacaccaacgttggggctggattaccggttattgagaacctgcaaaatctgctcaatgcaggtgatgaattgatgaagttctccggcattctttctggttcgctttcttatatcttcggcaagttagacgaaggcatgagtttctccgaggcgaccacgctggcgcgggaaatgggttataccgaaccggacccgcgagatgatctttctggtatggatgtggcgcgtaaactattgattctcgctcgtgaaacgggacgtgaactggagctggcggatattgaaattgaacctgtgctgcccgcagagtttaacgccgagggtgatgttgccgcttttatggcgaatctgtcacaactcgacgatctctttgccgcgcgcgtggcgaaggcccgtgatgaaggaaaagttttgcgctatgttggcaatattgatgaagatggcgtctgccgcgtgaagattgccgaagtggatggtaatgatccgctgttcaaagtgaaaaatggcgaaaacgccctggccttctatagccactattatcagccgctgccgttggtactgcgcggatatggtgcgggcaatgacgttacagctgccggtgtctttgctgatctgctacgtaccctctcatggaagttaggagtctga

SEQ ID NO: 9 - DNA, 933 bp, Artificial Sequence
  Synthetic
atggttaaagtttatgccccggcttccagtgccaatatgagcgtcgggtttgatgtgctcggggcggcggtgacacctgttgatggtgcattgctcggagatgtagtcacggttgaggcggcagagacattcagtctcaacaacctcggacgctttgccgataagctgccgtcagaaccacgggaaaatatcgtttatcagtgctgggagcgtttttgccaggaactgggtaagcaaattccagtggcgatgaccctggaaaagaatatgccgatcggttcgggcttaggctccagtgcctgttcggtggtcgcggcgctgatggcgatgaatgaacactgcggcaagccgcttaatgacactcgtttgctggctttgatgggcgagctggaaggccgtatctccggcagcattcattacgacaacgtggcaccgtgttttctcggtggtatgcagttgatgatcgaagaaaacgacatcatcagccagcaagtgccagggtttgatgagtggctgtgggtgctggcgtatccggggattaaagtctcgacggcagaagccagggctattttaccggcgcagtatcgccgccaggattgcattgcgcacgggcgacatctggcaggcttcattcacgcctgctattcccgtcagcctgagcttgccgcgaagctgatgaaagatgttatcgctgaaccctaccgtgaacggttactgccaggcttccggcaggcgcggcaggcggtcgcggaaatcggcgcggtagcgagcggtatctccggctccggcccgaccttgttcgctctgtgtgacaagccggaaaccgcccagcgcgttgccgactggttgggtaagaactacctgcaaaatcaggaaggttttgttcatatttgccggctggatacggcgggcgcacgagtactggaaaactaa

SEQ ID NO: 10 - DNA, 1287 bp, Artificial Sequence
  Synthetic
atgaaactctacaatctgaaagatcacaacgagcaggtcagctttgcgcaagccgtaacccaggggttgggcaaaaatcaggggctgttttttccgcacgacctgccggaattcagcctgactgaaattgatgagatgctgaagctggattttgtcacccgcagtgcgaagatcctctcggcgtttattggtgatgaaatcccacaggaaatcctggaagagcgcgtgcgcgcggcgtttgccttcccggctccggtcgccaatgttgaaagcgatgtcggttgtctggaattgttccacgggccaacgctggcatttaaagatttcggcggtcgctttatggcacaaatgctgacccatattgcgggtgataagccagtgaccattctgaccgcgacctccggtgataccggagcggcagtggctcatgctttctacggtttaccgaatgtgaaagtggttatcctctatccacgaggcaaaatcagtccactgcaagaaaaactgttctgtacattgggcggcaatatcgaaactgttgccatcgacggcgatttcgatgcctgtcaggcgctggtgaagcaggcgtttgatgatgaagaactgaaagtggcgctagggttaaactcggctaactcgattaacatcagccgtttgctggcgcagatttgctactactttgaagctgttgcgcagctgccgcaggagacgcgcaaccagctggttgtctcggtgccaagcggaaacttcggcgatttgacggcgggtctgctggcgaagtcactcggtctgccggtgaaacgttttattgctgcgaccaacgtgaacgataccgtgccacgtttcctgcacgacggtcagtggtcacccaaagcgactcaggcgacgttatccaacgcgatggacgtgagtcagccgaacaactggccgcgtgtggaagagttgttccgccgcaaaatctggcaactgaaagagctgggttatgcagccgtggatgatgaaaccacgcaacagacaatgcgtgagttaaaagaactgggctacacttcggagccgcacgctgccgtagcttatcgtgcgctgcgtgatcagttgaatccaggcgaatatggcttgttcctcggcaccgcgcatccggcgaaatttaaagagagcgtggaagcgattctcggtgaaacgttggatctgccaaaagagctggcagaacgtgctgatttacccttgctttcacataatctgcccgccgattttgctgcgttgcgtaaattgatgatgaatcatcagtaa

SEQ ID NO: 11 - DNA, 1311 bp, Artificial Sequence
  Synthetic
atgagtgaaacatacgtgtctgagaaaagtccaggagtgatggctagcggagcggagctgattcgtgccgccgacattcaaacggcgcaggcacgaatttcctccgtcattgcaccaactccattgcagtattgccctcgtctttctgaggaaaccggagcggaaatctaccttaagcgtgaggatctgcaggatgttcgttcctacaagatccgcggtgcgctgaactctggagcgcagctcacccaagagcagcgcgatgcaggtatcgttgccgcatctgcaggtaaccatgcccagggcgtggcctatgtgtgcaagtccttgggcgttcagggacgcatctatgttcctgtgcagactccaaagcaaaagcgtgaccgcatcatggttcacggcggagagtttgtctccttggtggtcactggcaataacttcgacgaagcatcggctgcagcgcatgaagatgcagagcgcaccggcgcaacgctgatcgagcctttcgatgctcgcaacaccgtcatcggtcagggcaccgtggctgctgagatcttgtcgcagctgacttccatgggcaagagtgcagatcacgtgatggttccagtcggcggtggcggacttcttgcaggtgtggtcagctacatggctgatatggcacctcgcactgcgatcgttggtatcgaaccagcgggagcagcatccatgcaggctgcattgcacaatggtggaccaatcactttggagactgttgatccctttgtggacggcgcagcagtcaaacgtgtcggagatctcaactacaccatcgtggagaagaaccagggtcgcgtgcacatgatgagcgcgaccgagggcgctgtgtgtactgagatgctcgatctttaccaaaacgaaggcatcatcgcggagcctgctggcgcgctgtctatcgctgggttgaaggaaatgtcctttgcacctggttctgcagtggtgtgcatcatctctggtggcaacaacgatgtgctgcgttatgcggaaatcgctgagcgctccttggtgcaccgcggtttgaagcactacttcttggtgaacttcccgcaaaagcctggtcagttgcgtcacttcctggaagatatcctgggaccggatgatgacatcacgctgtttgagtacctcaagcgcaacaaccgtgagaccggtactgcgttggtgggtattcacttgagtgaagcatcaggattggattctttgctggaacgtatggaggaatcggcaattgattcccgtcgcctcgagccgggcacccctgagtacgaatacttgacctaa

SEQ ID NO: 12 - DNA, 2664 bp, Artificial Sequence
  Synthetic
atgtcagaacgtttcccaaatgacgtggatccgatcgaaactcgcgactggctccaggcgatcgaatcggtcatccgtgaagaaggtgttgagcgtgctcagtatctgatcgaccaactgcttgctgaagcccgcaaaggcggtgtaaacgtagccgcaggcacaggtatcagcaactacatcaacaccatccccgttgaagaacaaccggagtatccgggtaatctggaactggaacgccgtattcgttcagctatccgctggaacgccatcatgacggtgctgcgtgcgtcgaaaaaagacctcgaactgggcggccatatggcgtccttccagtcttccgcaaccatttatgatgtgtgctttaaccacttcttccgtgcacgcaacgagcaggatggcggcgacctggtttacttccagggccacatctccccgggcgtgtacgctcgtgctttcctggaaggtcgtctgactcaggagcagctggataacttccgtcaggaagttcacggcaatggcctctcttcctatccgcacccgaaactgatgccggaattctggcagttcccgaccgtatctatgggtctgggtccgattggtgctatttaccaggctaaattcctgaaatatctggaacaccgtggcctgaaagatacctctaaacaaaccgtttacgcgttcctcggtgacggtgaaatggacgaaccggaatccaaaggtgcgatcaccatcgctacccgtgaaaaactggataacctggtcttcgttatcaactgtaacctgcagcgtcttgacggcccggtcaccggtaacggcaagatcatcaacgaactggaaggcatcttcgaaggtgctggctggaacgtgatcaaagtgatgtggggtagccgttgggatgaactgctgcgtaaggataccagcggtaaactgatccagctgatgaacgaaaccgttgacggcgactaccagaccttcaaatcgaaagatggtgcgtacgttcgtgaacacttcttcggtaaatatcctgaaaccgcagcactggttgcagactggactgacgagcagatctgggcactgaaccgtggtggtcacgatccgaagaaaatctacgctgcattcaagaaagcgcaggaaaccaaaggcaaagcgacagtaatccttgctcataccattaaaggttacggcatgggcgacgcggctgaaggtaaaaacatcgcgcaccaggttaagaaaatgaacatggacggtgtgcgtcatatccgcgaccgtttcaatgtgccggtgtctgatgcagatatcgaaaaactgccgtacatcaccttcccggaaggttctgaagagcatacctatctgcacgctcagcgtcagaaactgcacggttatctgccaagccgtcagccgaacttcaccgagaagcttgagctgccgagcctgcaagacttcggcgcgctgttggaagagcagagcaaagagatctctaccactatcgctttcgttcgtgctctgaacgtgatgctgaagaacaagtcgatcaaagatcgtctggtaccgatcatcgccgacgaagcgcgtactttcggtatggaaggtctgttccgtcagattggtatttacagcccgaacggtcagcagtacaccccgcaggaccgcgagcaggttgcttactataaagaagacgagaaaggtcagattctgcaggaagggatcaacgagctgggcgcaggttgttcctggctggcagcggcgacctcttacagcaccaacaatctgccgatgatcccgttctacatctattactcgatgttcggcttccagcgtattggcgatctgtgctgggcggctggcgaccagcaagcgcgtggcttcctgatcggcggtacttccggtcgtaccaccctgaacggcgaaggtctgcagcacgaagatggtcacagccacattcagtcgctgactatcccgaactgtatctcttacgacccggcttacgcttacgaagttgctgtcatcatgcatgacggtctggagcgtatgtacggtgaaaaacaagagaacgtttactactacatcactacgctgaacgaaaactaccacatgccggcaatgccggaaggtgctgaggaaggtatccgtaaaggtatctacaaactcgaaactattgaaggtagcaaaggtaaagttcagctgctcggctccggttctatcctgcgtcacgtccgtgaagcagctgagatcctggcgaaagattacggcgtaggttctgacgtttatagcgtgacctccttcaccgagctggcgcgtgatggtcaggattgtgaacgctggaacatgctgcacccgctggaaactccgcgcgttccgtatatcgctcaggtgatgaacgacgctccggcagtggcatctaccgactatatgaaactgttcgctgagcaggtccgtacttacgtaccggctgacgactaccgcgtactgggtactgatggcttcggtcgttccgacagccgtgagaacctgcgtcaccacttcgaagttgatgcttcttatgtcgtggttgcggcgctgggcgaactggctaaacgtggcgaaatcgataagaaagtggttgctgacgcaatcgccaaattcaacatcgatgcagataaagttaacccgcgtctggcgtaa

SEQ ID NO: 13 - DNA, 1893 bp, Artificial Sequence
  Synthetic
atggctatcgaaatcaaagtaccggacatcggggctgatgaagttgaaatcaccgagatcctggtcaaagtgggcgacaaagttgaagccgaacagtcgctgatcaccgtagaaggcgacaaagcctctatggaagttccgtctccgcaggcgggtatcgttaaagagatcaaagtctctgttggcgataaaacccagaccggcgcactgattatgattttcgattccgccgacggtgcagcagacgctgcacctgctcaggcagaagagaagaaagaagcagctccggcagcagcaccagcggctgcggcggcaaaagacgttaacgttccggatatcggcagcgacgaagttgaagtgaccgaaatcctggtgaaagttggcgataaagttgaagctgaacagtcgctgatcaccgtagaaggcgacaaggcttctatggaagttccggctccgtttgctggcaccgtgaaagagatcaaagtgaacgtgggtgacaaagtgtctaccggctcgctgattatggtcttcgaagtcgcgggtgaagcaggcgcggcagctccggccgctaaacaggaagcagctccggcagcggcccctgcaccagcggctggcgtgaaagaagttaacgttccggatatcggcggtgacgaagttgaagtgactgaagtgatggtgaaagtgggcgacaaagttgccgctgaacagtcactgatcaccgtagaaggcgacaaagcttctatggaagttccggcgccgtttgcaggcgtcgtgaaggaactgaaagtcaacgttggcgataaagtgaaaactggctcgctgattatgatcttcgaagttgaaggcgcagcgcctgcggcagctcctgcgaaacaggaagcggcagcgccggcaccggcagcaaaagctgaagccccggcagcagcaccagctgcgaaagcggaaggcaaatctgaatttgctgaaaacgacgcttatgttcacgcgactccgctgatccgccgtctggcacgcgagtttggtgttaaccttgcgaaagtgaagggcactggccgtaaaggtcgtatcctgcgcgaagacgttcaggcttacgtgaaagaagctatcaaacgtgcagaagcagctccggcagcgactggcggtggtatccctggcatgctgccgtggccgaaggtggacttcagcaagtttggtgaaatcgaagaagtggaactgggccgcatccagaaaatctctggtgcgaacctgagccgtaactgggtaatgatcccgcatgttactcacttcgacaaaaccgatatcaccgagttggaagcgttccgtaaacagcagaacgaagaagcggcgaaacgtaagctggatgtgaagatcaccccggttgtcttcatcatgaaagccgttgctgcagctcttgagcagatgcctcgcttcaatagttcgctgtcggaagacggtcagcgtctgaccctgaagaaatacatcaacatcggtgtggcggtggataccccgaacggtctggttgttccggtattcaaagacgtcaacaagaaaggcatcatcgagctgtctcgcgagctgatgactatttctaagaaagcgcgtgacggtaagctgactgcgggcgaaatgcagggcggttgcttcaccatctccagcatcggcggcctgggtactacccacttcgcgccgattgtgaacgcgccggaagtggctatcctcggcgtttccaagtccgcgatggagccggtgtggaatggtaaagagttcgtgccgcgtctgatgctgccgatttctctctccttcgaccaccgcgtgatcgacggtgctgatggtgcccgtttcattaccatcattaacaacacgctgtctgacattcgccgtctggtgatgtaa

SEQ ID NO: 14 - DNA, 1425 bp, Artificial Sequence
  Synthetic
atgagtactgaaatcaaaactcaggtcgtggtacttggggcaggccccgcaggttactccgctgccttccgttgcgctgatttaggtctggaaaccgtaatcgtagaacgttacaacacccttggcggtgtttgcctgaacgtcggctgtatcccttctaaagcactgctgcacgtagcaaaagttatcgaagaagccaaagcgctggctgaacacggtatcgtcttcggcgaaccgaaaaccgatatcgacaagattcgtacctggaaagagaaagtgatcaatcagctgaccggtggtctggctggtatggcgaaaggccgcaaagtcaaagtggtcaacggtctgggtaaattcaccggggctaacaccctggaagttgaaggtgagaacggcaaaaccgtgatcaacttcgacaacgcgatcattgcagcgggttctcgcccgatccaactgccgtttattccgcatgaagatccgcgtatctgggactccactgacgcgctggaactgaaagaagtaccagaacgcctgctggtaatgggtggcggtatcatcggtctggaaatgggcaccgtttaccacgcgctgggttcacagattgacgtggttgaaatgttcgaccaggttatcccggcagctgacaaagacatcgttaaagtcttcaccaagcgtatcagcaagaaattcaacctgatgctggaaaccaaagttaccgccgttgaagcgaaagaagacggcatttatgtgacgatggaaggcaaaaaagcacccgctgaaccgcagcgttacgacgccgtgctggtagcgattggtcgtgtgccgaacggtaaaaacctcgacgcaggcaaagcaggcgtggaagttgacgaccgtggtttcatccgcgttgacaaacagctgcgtaccaacgtaccgcacatctttgctatcggcgatatcgtcggtcaaccgatgctggcacacaaaggtgttcacgaaggtcacgttgccgctgaagttatcgccggtaagaaacactacttcgatccgaaagttatcccgtccatcgcctataccaaaccagaagttgcatgggtgggtctgactgagaaagaagcgaaagagaaaggcatcagctatgaaaccgccaccttcccgtgggctgcttctggtcgtgctatcgcttccgactgcgcagacggtatgaccaagctgattttcgacaaagaatctcaccgtgtgatcggtggtgcgattgtcggtactaacggcggcgagctgctgggtgaaatcggcctggcaatcgaaatgggttgtgatgctgaagacatcgcactgaccatccacgcgcacccgactctgcacgagtctgtgggcctggcggcagaagtgttcgaaggtagcattaccgacctgccgaacccgaaagcgaagaagaagtaa

SEQ ID NO: 15 - DNA, 861 bp, Artificial Sequence
  Synthetic
atgagtcaggcgctaaaaaatttactgacattgttaaatctggaaaaaattgaggaaggactctttcgcggccagagtgaagatttaggtttacgccaggtgtttggcggccaggtcgtgggtcaggccttgtatgctgcaaaagagaccgtccctgaagagcggctggtacattcgtttcacagctactttcttcgccctggcgatagtaagaagccgattatttatgatgtcgaaacgctgcgtgacggtaacagcttcagcgcccgccgggttgctgctattcaaaacggcaaaccgattttttatatgactgcctctttccaggcaccagaagcgggtttcgaacatcaaaaaacaatgccgtccgcgccagcgcctgatggcctcccttcggaaacgcaaatcgcccaatcgctggcgcacctgctgccgccagtgctgaaagataaattcatctgcgatcgtccgctggaagtccgtccggtggagtttcataacccactgaaaggtcacgtcgcagaaccacatcgtcaggtgtggatccgcgcaaatggtagcgtgccggatgacctgcgcgttcatcagtatctgctcggttacgcttctgatcttaacttcctgccggtagctctacagccgcacggcatcggttttctcgaaccggggattcagattgccaccattgaccattccatgtggttccatcgcccgtttaatttgaatgaatggctgctgtatagcgtggagagcacctcggcgtccagcgcacgtggctttgtgcgcggtgagttttatacccaagacggcgtactggttgcctcgaccgttcaggaaggggtgatgcgtaatcacaattaa

SEQ ID NO: 16 - DNA, 981 bp, Artificial Sequence
  Synthetic
atgcgtgcggtactgatcgagaagtccgatgatacacagtccgtctctgtcaccgaactggctgaagatcaactgccggaaggcgacgttttggtagatgttgcttattcaacactgaactacaaagacgccctggcaattaccggtaaagcccccgtcgttcgtcgttttccgatggtacctggaatcgactttacgggtaccgtggcccagtcttcccacgccgacttcaagccaggtgatcgcgtaatcctgaatggttggggtgtgggggaaaaacattggggcggtttagcggagcgcgctcgcgtgcgcggagactggcttgttcccttgccagcccccctggacttacgccaagcggccatgatcggtacagcaggatacacggcgatgttgtgcgttctggcgcttgaacgtcacggagtggtgccgggtaatggggaaatcgtggtgtccggtgcagcaggcggcgtcggctccgttgcgacgacccttcttgccgctaagggctatgaggtagcggcagtgactggacgtgcgtccgaagcagaatatctgcgcggtttgggggcggcgagcgtaattgatcgtaacgaattaacggggaaggtacgcccgctgggtcaggagcgttgggctggcgggattgacgtggcgggatcaaccgtgcttgcgaacatgctttctatgatgaagtatcgcggggtagtcgctgcgtgtggcctggccgcgggcatggatctgcccgcgtctgtcgcgccctttattcttcgtgggatgacgctggcaggggtggatagcgttatgtgcccaaagacagatcgtttagcagcgtgggcccgtttggcgtcagatcttgaccctgccaagctggaggagatgactacagagttgccgtttagtgaagtaatcgagacagcacccaaattcttggacgggacggttcgtggccgcattgttatccccgtaacgccctaa

SEQ ID NO: 17 - DNA, 2145 bp, Artificial Sequence
  Synthetic
atgtctaacgtgcaggagtggcaacagcttgccaacaaggaattgagccgtcgggagaaaactgtcgactcgctggttcatcaaaccgcggaagggatcgccatcaagccgctgtataccgaagccgatctcgataatctggaggtgacaggtacccttcctggtttgccgccctacgttcgtggcccgcgtgccactatgtataccgcccaaccgtggaccatccgtcagtatgctggtttttcaacagcaaaagagtccaacgctttttatcgccgtaacctggccgccgggcaaaaaggtctttccgttgcgtttgaccttgccacccaccgtggctacgactccgataacccgcgcgtggcgggcgacgtcggcaaagcgggcgtcgctatcgacaccgtggaagatatgaaagtcctgttcgaccagatcccgctggataaaatgtcggtttcgatgaccatgaatggcgcagtgctaccagtactggcgttttatatcgtcgccgcagaagagcaaggtgttacacctgataaactgaccggcaccattcaaaacgatattctcaaagagtacctctgccgcaacacctatatttacccaccaaaaccgtcaatgcgcattatcgccgacatcatcgcctggtgttccggcaacatgccgcgatttaataccatcagtatcagcggttaccacatgggtgaagcgggtgccaactgcgtgcagcaggtagcatttacgctcgctgatgggattgagtacatcaaagcagcaatctctgccggactgaaaattgatgacttcgctcctcgcctgtcgttcttcttcggcatcggcatggatctgtttatgaacgtcgccatgttgcgtgcggcacgttatttatggagcgaagcggtcagtggatttggcgcacaggacccgaaatcactggcgctgcgtacccactgccagacctcaggctggagcctgactgaacaggatccgtataacaacgttatccgcaccaccattgaagcgctggctgcgacgctgggcggtactcagtcactgcataccaacgcctttgacgaagcgcttggtttgcctaccgatttctcagcacgcattgcccgcaacacccagatcatcatccaggaagaatcagaactctgccgcaccgtcgatccactggccggatcctattacattgagtcgctgaccgatcaaatcgtcaaacaagccagagctattatccaacagatcgacgaagccggtggcatggcgaaagcgatcgaagcaggtctgccaaaacgaatgatcgaagaggcctcagcgcgcgaacagtcgctgatcgaccagggcaagcgtgtcatcgttggtgtcaacaagtacaaactggatcacgaagacgaaaccgatgtacttgagatcgacaacgtgatggtgcgtaacgagcaaattgcttcgctggaacgcattcgcgccacccgtgatgatgccgccgtaaccgccgcgttgaacgccctgactcacgccgcacagcataacgaaaacctgctggctgccgctgttaatgccgctcgcgttcgcgccaccctgggtgaaatttccgatgcgctggaagtcgctttcgaccgttatctggtgccaagccagtgtgttaccggcgtgattgcgcaaagctatcatcagtctgagaaatcggcctccgagttcgatgccattgttgcgcaaacggagcagttccttgccgacaatggtcgtcgcccgcgcattctgatcgctaagatgggccaggatggacacgatcgcggcgcgaaagtgatcgccagcgcctattccgatctcggtttcgacgtagatttaagcccgatgttctctacacctgaagagatcgcccgcctggccgtagaaaacgacgttcacgtagtgggcgcatcctcactggctgccggtcataaaacgctgatcccggaactggtcgaagcgctgaaaaaatggggacgcgaagatatctgcgtggtcgcgggtggcgtcattccgccgcaggattacgccttcctgcaagagcgcggcgtggcggcgatttatggtccaggtacacctatgctcgacagtgtgcgcgacgtactgaatctgataagccagcatcatgattaa

SEQ ID NO: 18 - DNA, 996 bp, Artificial Sequence
  Synthetic
atgattaatgaagccacgctggcagaaagtattcgccgcttacgtcagggtgagcgtgccacactcgcccaggccatgacgctggtggaaagccgtcacccgcgtcatcaggcactaagtacgcagctgcttgatgccattatgccgtactgcggtaacaccctgcgactgggcgttaccggcacccccggcgcggggaaaagtacctttcttgaggcctttggcatgttgttgattcgagagggattaaaggtcgcggttattgcggtcgatcccagcagcccggtcactggcggtagcattctcggggataaaacccgcatgaatgacctggcgcgtgccgaagcggcgtttattcgcccggtaccatcctccggtcatctgggcggtgccagtcagcgagcgcgggaattaatgctgttatgcgaagcagcgggttatgacgtagtgattgtcgaaacggttggcgtcgggcagtcggaaacagaagtcgcccgcatggtggactgttttatctcgttgcaaattgccggtggcggcgatgatctgcagggcattaaaaaagggctgatggaagtggctgatctgatcgttatcaacaaagacgatggcgataaccataccaatgtcgccattgcccggcatatgtacgagagtgccctgcatattctgcgacgtaaatacgacgaatggcagccacgggttctgacttgtagcgcactggaaaaacgtggaatcgatgagatctggcacgccatcatcgacttcaaaaccgcgctaactgccagtggtcgtttacaacaagtgcggcaacaacaatcggtggaatggctgcgtaagcagaccgaagaagaagtactgaatcacctgttcgcgaatgaagatttcgatcgctattaccgccagacgcttttagcggtcaaaaacaatacgctctcaccgcgcaccggcctgcggcagctcagtgaatttatccagacgcaatattttgattaa

SEQ ID NO: 19 - DNA, 786 bp, Artificial Sequence
  Synthetic
atgtcttatcagtatgttaacgttgtcactatcaacaaagtggcggtcattgagtttaactatggccgaaaacttaatgccttaagtaaagtctttattgatgatcttatgcaggcgttaagcgatctcaaccggccggaaattcgctgtatcattttgcgcgcaccgagtggatccaaagtcttctccgcaggtcacgatattcacgaactgccgtctggcggtcgcgatccgctctcctatgatgatccattgcgtcaaatcacccgcatgatccaaaaattcccgaaaccgatcatttcgatggtggaaggtagtgtttggggtggcgcatttgaaatgatcatgagttccgatctgatcatcgccgccagtacctcaaccttctcaatgacgcctgtaaacctcggcgtcccgtataacctggtcggcattcacaacctgacccgcgacgcgggcttccacattgtcaaagagctgatttttaccgcttcgccaatcaccgcccagcgcgcgctggctgtcggcatcctcaaccatgttgtggaagtggaagaactggaagatttcaccttacaaatggcgcaccacatctctgagaaagcgccgttagccattgccgttatcaaagaagagctgcgtgtactgggcgaagcacacaccatgaactccgatgaatttgaacgtattcaggggatgcgccgcgcggtgtatgacagcgaagattaccaggaagggatgaacgctttcctcgaaaaacgtaaacctaatttcgttggtcattaa

SEQ ID NO: 20 - DNA, 1479 bp, Artificial Sequence
  Synthetic
atggaaactcagtggacaaggatgaccgccaatgaagcggcagaaattatccagcataacgacatggtggcatttagcggctttaccccggcgggttcgccgaaagccctacccaccgcgattgcccgcagagctaacgaacagcatgaggccaaaaagccgtatcaaattcgccttctgacgggtgcgtcaatcagcgccgccgctgacgatgtactttctgacgccgatgctgtttcctggcgtgcgccatatcaaacatcgtccggtttacgtaaaaagatcaatcagggcgcggtgagtttcgttgacctgcatttgagcgaagtggcgcaaatggtcaattacggtttcttcggcgacattgatgttgccgtcattgaagcatcggcactggcaccggatggtcgagtctggttaaccagcgggatcggtaatgcgccgacctggctgctgcgggcgaagaaagtgatcattgaactcaatcactatcacgatccgcgcgttgcagaactggcggatattgtgattcctggcgcgccaccgcggcgcaatagcgtgtcgatcttccatgcaatggatcgcgtcggtacccgctatgtgcaaatcgatccgaaaaagattgtcgccgtcgtggaaaccaacttgcccgacgccggtaatatgctggataagcaaaatcccatgtgccagcagattgccgataacgtggtcacgttcttattgcaggaaatggcgcatgggcgtattccgccggaatttctgccgctgcaaagtggcgtgggcaatatcaataatgcggtaatggcgcgtctgggggaaaacccggtaattcctccgtttatgatgtattcggaagtgctacaggaatcggtggtgcatttactggaaaccggcaaaatcagcggggccagcgcctccagcctgacaatctcggccgattccctgcgcaagatttacgacaatatggattactttgccagccgcattgtgttgcgtccgcaggagatttccaataacccggaaatcatccgtcgtctgggcgtcatcgctctgaacgtcggcctggagtttgatatttacgggcatgccaactcaacacacgtagccggggtcgatctgatgaacggcatcggcggcagcggtgattttgaacgcaacgcgtatctgtcgatctttatggccccgtcgattgctaaagaaggcaagatctcaaccgtcgtgccaatgtgcagccatgttgatcacagcgaacacagcgtcaaagtgatcatcaccgaacaagggatcgccgatctgcgcggtctttccccgcttcaacgcgcccgcactatcattgataattgtgcacatcctatgtatcgggattatctgcatcgctatctggaaaatgcgcctggcggacatattcaccacgatcttagccacgtcttcgacttacaccgtaatttaattgcaaccggctcgatgctgggttaa

SEQ ID NO: 21 - DNA, 1917 bp, Artificial Sequence
  Synthetic
atgagcagcacggatcaggggaccaaccccgccgacactgacgacctcactcccaccacactcagtctggccggggatttccccaaggccactgaggagcagtgggagcgcgaagttgagaaggtattcaaccgtggtcgtccaccggagaagcagctgaccttcgccgagtgtctgaagcgcctgacggttcacaccgtcgatggcatcgacatcgtgccgatgtaccgtccgaaggacgcgccgaagaagctgggttaccccggcgtcacccccttcacccgcggcaccacggtgcgcaacggtgacatggatgcctgggacgtgcgcgccctgcacgaggatcccgacgagaagttcacccgcaaggcgatccttgaagacctggagcgtggcgtcacctccctgttgttgcgcgttgatcccgacgcgatcgcacccgagcacctcgacgaggtcctctccgacgtcctgctggaaatgaccaaggtggaggtcttcagccgctacgaccagggtgccgccgccgaggccttgatgggcgtctacgagcgctccgacaagccggcgaaggacctggccctgaacctgggcctggatcccatcggcttcgcggccctgcagggcaccgagccggatctgaccgtgctcggtgactgggtgcgccgcctggcgaagttctcaccggactcgcgcgccgtcacgatcgacgcgaacgtctaccacaacgccggtgccggcgacgtggcagagctcgcttgggcactggccaccggcgcggagtacgtgcgcgccctggtcgaacagggcttcaacgccacagaggccttcgacacgatcaacttccgtgtcaccgccacccacgaccagttcctcacgatcgcccgtcttcgcgccctgcgcgaggcatgggcccgcatcggcgaggtctttggcgtggacgaggacaagcgcggcgctcgccagaatgcgatcaccagttggcgtgagctcacccgcgaagacccctatgtcaacatccttcgcggttcgattgccaccttctccgcctccgttggcggggccgagtcgatcacgacgctgcccttcacccaggccctcggcctgccggaggacgacttcccgctgcgcatcgcgcgcaacacgggcatcgtgctcgccgaagaggtgaacatcggccgcgtcaacgacccggccggtggctcctactacgtcgagtcgctcactcgcaccctggccgacgctgcctggaaggaattccaggaggtcgagaagctcggtggcatgtcgaaggcggtcatgaccgagcacgtcaccaaggtgctcgacgcctgcaatgccgagcgcgccaagcgcctggccaaccgcaagcagccgatcaccgcggtcagcgagttcccgatgatcggggcccgcagcatcgagaccaagccgttcccaaccgctccggcgcgcaagggcctggcctggcatcgcgattccgaggtgttcgagcagctgatggatcgctccaccagcgtctccgagcgccccaaggtgttccttgcctgcctgggcacccgtcgcgacttcggtggccgcgagggcttctccagcccggtatggcacatcgccggtatcgacaccccgcaggtcgaaggcggcaccaccgccgagatcgtcgaggcgttcaagaagtcgggcgcccaggtggccgatctctgctcgtccgccaagatctacgcgcagcagggacttgaggttgccaaggcgctcaaggccgccggcgcgaaggccctgtatctgtcgggcgccttcaaggagttcggcgatgacgccgccgaggccgagaagctgatcgacggacgcctgtacatgggcatggatgtcgtcgacaccctgtcctccacccttgatatcttgggagtcgcgaagtga

SEQ ID NO: 22 - DNA, 2187 bp, Artificial Sequence
  Synthetic
gtgagcactctgccccgttttgattcagttgacctgggcaatgccccggttcctgctgatgccgcacagcgcttcgaggagttggccgccaaggccggcaccgaagaggcgtgggagacggctgagcagattccggttggcaccctgttcaacgaagacgtctacaaggacatggactggctggacacctacgccggtatcccgccgttcgtccacggcccatatgcaaccatgtacgcgttccgtccctggacgattcgccagtacgccggcttctccacggccaaggagtccaacgccttctaccgccgcaaccttgcggcgggccagaagggcctgtcggttgccttcgacctgcccacccaccgcggctacgactcggacaatccccgcgtcgccggtgacgtcggcatggccggggtggccatcgactccatctatgacatgcgcgagctgttcgccggcattccgctggaccagatgagcgtgtcgatgaccatgaacggcgccgtgctgccgatcctggccctctatgtggtgaccgccgaggagcagggcgtcaagcccgagcagctcgccgggacgatccagaacgacatcctcaaggagttcatggttcgtaacacctatatctacccgccgcagccgagtatgcgaatcatctccgagatcttcgcctacacgagtgccaatatgccgaagtggaattcgatttccatttccggctaccacatgcaggaagccggcgccacggccgacatcgagatggcctacaccctggccgacggtgtcgactacatccgcgccggcgagtcggtgggcctcaatgtcgaccagttcgcgccgcgtctgtccttcttctggggcatcggcatgaacttcttcatggaggttgccaagctgcgtgccgcacgtatgttgtgggccaagctggtgcatcagttcgggccgaagaatccgaagtcgatgagcctgcgcacccactcgcagacctccggttggtcgctgaccgcccaggacgtctacaacaacgtcgtgcgtacctgcatcgaggccatggccgccacccagggccatacccagtcgctgcacacgaactcgctcgacgaggccattgccctaccgaccgatttcagcgcccgcatcgcccgtaacacccagctgttcctgcagcaggaatcgggcacgacgcgcgtgatcgacccgtggagcggctcggcatacgtcgaggagctcacctgggacctggcccgcaaggcatggggccacatccaggaggtcgagaaggtcggcggcatggccaaggccatcgaaaagggcatccccaagatgcgcattgaggaagccgccgcccgcacccaggcacgcatcgactccggccgtcagccgctgatcggcgtgaacaagtaccgcctggagcacgagccgccgctcgatgtgctcaaggttgacaactccacggtgctcgccgagcagaaggccaagctggtcaagctgcgcgccgagcgcgatcccgagaaggtcaaggccgccctcgacaagatcacctgggctgccgccaaccccgacgacaaggatccggatcgcaacctgctgaagctgtgcatcgacgctggccgcgccatggcgacggtcggcgagatgagcgacgcgctcgagaaggtcttcggacgctacaccgcccagattcgcaccatctccggtgtgtactcgaaggaagtgaagaacacgcctgaggttgaggaagcacgcgagctcgttgaggaattcgagcaggccgagggccgtcgtcctcgcatcctgctggccaagatgggccaggacggtcacgaccgtggccagaaggtcatcgccaccgcctatgccgacctcggtttcgacgtcgacgtgggcccgctgttccagaccccggaggagaccgcacgtcaggccgtcgaggccgatgtgcacgtggtgggcgtttcgtcgctcgccggcgggcatctgacgctggttccggccctgcgcaaggagctggacaagctcggacgtcccgacatcctcatcaccgtgggcggcgtgatccctgagcaggacttcgacgagctgcgtaaggacggcgccgtggagatctacacccccggcaccgtcattccggagtcggcgatctcgctggtcaagaaactgcgggcttcgctcgatgcctag

SEQ ID NO: 23 - DNA, 447 bp, Artificial Sequence
  Synthetic
atgagtaatgaggatcttttcatctgtatcgatcacgtggcatatgcgtgccccgacgccgacgaggcttccaagtactaccaggagaccttcggctggcatgagctccaccgcgaggagaacccggagcagggagtcgtcgagatcatgatggccccggctgcgaagctgaccgagcacatgacccaggttcaggtcatggccccgctcaacgacgagtcgaccgttgccaagtggcttgccaagcacaatggtcgcgccggactgcaccacatggcatggcgtgtcgatgacatcgacgccgtcagcgccaccctgcgcgagcgcggcgtgcagctgctgtatgacgagcccaagctcggcaccggcggcaaccgcatcaacttcatgcatcccaagtcgggcaagggcgtgctcatcgagctcacccagtacccgaagaactga

SEQ ID NO: 24 - DNA, 1575 bp, Artificial Sequence
  Synthetic
atggctgaaaacaacaatttgaagctcgccagcaccatggaaggtcgcgtggagcagctcgcagagcagcgccaggtgatcgaagccggtggcggcgaacgtcgcgtcgagaagcaacattcccagggtaagcagaccgctcgtgagcgcctgaacaacctgctcgatccccattcgttcgacgaggtcggcgctttccgcaagcaccgcaccacgttgttcggcatggacaaggccgtcgtcccggcagatggcgtggtcaccggccgtggcaccatccttggtcgtcccgtgcacgccgcgtcccaggacttcacggtcatgggtggttcggctggcgagacgcagtccacgaaggtcgtcgagacgatggaacaggcgctgctcaccggcacgcccttcctgttcttctacgattcgggcggcgcccggatccaggagggcatcgactcgctgagcggttacggcaagatgttcttcgccaacgtgaagctgtcgggcgtcgtgccgcagatcgccatcattgccggcccctgtgccggtggcgcctcgtattcgccggcactgactgacttcatcatcatgaccaagaaggcccatatgttcatcacgggcccccaggtcatcaagtcggtcaccggcgaggatgtcaccgctgacgaactcggtggcgctgaggcccatatggccatctcgggcaatatccacttcgtggccgaggacgacgacgccgcggagctcattgccaagaagctgctgagcttccttccgcagaacaacactgaggaagcatccttcgtcaacccgaacaatgacgtcagccccaataccgagctgcgcgacatcgttccgattgacggcaagaagggctatgacgtgcgcgatgtcattgccaagatcgtcgactggggtgactacctcgaggtcaaggccggctatgccaccaacctcgtgaccgccttcgcccgggtcaatggtcgttcggtgggcatcgtggccaatcagccgtcggtgatgtcgggttgcctcgacatcaacgcctctgacaaggccgccgaattcgtgaatttctgcgattcgttcaacatcccgctggtgcagctggtcgacgtgccgggcttcctgcccggcgtgcagcaggagtacggcggcatcattcgccatggcgcgaagatgctgtacgcctactccgaggccaccgtgccgaagatcaccgtggtgctccgcaaggcctacggcggctcctacctggccatgtgcaaccgtgaccttggtgccgacgccgtgtacgcctggcccagcgccgagattgcggtgatgggcgccgagggtgcggcaaatgtgatcttccgcaaggagatcaaggctgccgacgatcccgacgccatgcgcgccgagaagatcgaggagtaccagaacgcgttcaacacgccgtacgtggccgccgcccgcggtcaggtcgacgacgtgattgacccggctgatacccgtcgaaagattgcttccgccctggagatgtacgccaccaagcgtcagacccgcccggcgaagaagcatggaaacttcccctgctga

SEQ ID NO: 25 - DNA, 1518 bp, Artificial Sequence
  Synthetic
atgagtccgcgagaaattgaggtttccgagccgcgcgaggttggtatcaccgagctcgtgctgcgcgatgcccatcagagcctgatggccacacgaatggcaatggaagacatggtcggcgcctgtgcagacattgatgctgccgggtactggtcagtggagtgttggggtggtgccacgtatgactcgtgtatccgcttcctcaacgaggatccttgggagcgtctgcgcacgttccgcaagctgatgcccaacagccgtctccagatgctgctgcgtggccagaacctgctgggttaccgccactacaacgacgaggtcgtcgatcgcttcgtcgacaagtccgctgagaacggcatggacgtgttccgtgtcttcgacgccatgaatgatccccgcaacatggcgcacgccatggctgccgtcaagaaggccggcaagcacgcgcagggcaccatttgctacacgatcagcccggtccacaccgttgagggctatgtcaagcttgctggtcagctgctcgacatgggtgctgattccatcgccctgaaggacatggccgccctgctcaagccgcagccggcctacgacatcatcaaggccatcaaggacacctacggccagaagacgcagatcaacctgcactgccactccaccacgggtgtcaccgaggtctccctcatgaaggccatcgaggccggcgtcgacgtcgtcgacaccgccatctcgtccatgtcgctcggcccgggccacaaccccaccgagtcggttgccgagatgctcgagggcaccgggtacaccaccaaccttgactacgatcgcctgcacaagatccgcgatcacttcaaggccatccgcccgaagtacaagaagttcgagtcgaagacgcttgtcgacacctcgatcttcaagtcgcagatccccggcggcatgctctccaacatggagtcgcagctgcgcgcccagggcgccgaggacaagatggacgaggtcatggcagaggtgccgcgcgtccgcaaggccgccggcttcccgcccctggtcaccccgtccagccagatcgtcggcacgcaggccgtgttcaacgtgatgatgggcgagtacaagaggatgaccggcgagttcgccgacatcatgctcggctactacggcgccagcccggccgatcgcgatccgaaggtggtcaagttggccgaggagcagtccggcaagaagccgatcacccagcgcccggccgatctgctgccccccgagtgggaggagcagtccaaggaggccgcggccctcaagggcttcaacggcaccgacgaggacgtgctcacctatgcactgttcccgcaggtcgctccggtcttcttcgagcatcgcgccgagggcccgcacagcgtggctctcaccgatgcccagctgaaggccgaggccgagggcgacgagaagtcgctcgccgtggccggtcccgtcacctacaacgtgaacgtgggcggaaccgtccgcgaagtcaccgttcagcaggcgtga

SEQ ID NO: 26 - DNA, 372 bp, Artificial Sequence
  Synthetic
atgaaactgaaggtaacagtcaacggcactgcgtatgacgttgacgttgacgtcgacaagtcacacgaaaacccgatgggcaccatcctgttcggcggcggcaccggcggcgcgccggcaccgcgcgcagcaggtggcgcaggcgccggtaaggccggagagggcgagattcccgctccgctggccggcaccgtctccaagatcctcgtgaaggagggtgacacggtcaaggctggtcagaccgtgctcgttctcgaggccatgaagatggagaccgagatcaacgctcccaccgacggcaaggtcgagaaggtccttgtcaaggagcgtgacgccgtgcagggcggtcagggtctcatcaagatcggctga

SEQ ID NO: 27 - protein, 524 aa, Artificial Sequence
  Synthetic
MRKVPIITADEAAKLIKDGDTVTTSGFVGNAIPEALDRAVEKRFLETGEPKNITYVYCGSQGNRDGRGAEHFAHEGLLKRYIAGHWATVPALGKMAMENKMEAYNVSQGALCHLFRDIASHKPGVFTKVGIGTFIDPRNGGGKVNDITKEDIVELVEIKGQEYLFYPAFPIHVALIRGTYADESGNITFEKEVAPLEGTSVCQAVKNSGGIVVVQVERVVKAGTLDPRHVKVPGIYVDYVVVADPEDHQQSLDCEYDPALSGEHRRPEVVGEPLPLSAKKVIGRRGAIELEKDVAVNLGVGAPEYVASVADEEGIVDFMTLTAESGAIGGVPAGGVRFGASYNADALIDQGYQFDYYDGGGLDLCYLGLAECDEKGNINVSRFGPRIAGCGGFINITQNTPKVFFCGTFTAGGLKVKIEDGKVIIVQEGKQKKFLKAVEQITFNGDVALANKQQVTYITERCVFLLKEDGLHLSEIAPGIDLQTQILDVMDFAPIIDRDANGQIKLMDAALFAEGLMGLKEMKS

SEQ ID NO: 28 - protein, 422 aa, Artificial Sequence
  Synthetic
MSLTQGMKAKQLLAYFQGKADQDAREAKARGELVCWSASVAPPEFCVTMGIAMIYPETHAAGIGARKGAMDMLEVADRKGYNVDCCSYGRVNMGYMECLKEAAITGVKPEVLVNSPAADVPLPDLVITCNNICNTLLKWYENLAAELDIPCIVIDVPFNHTMPIPEYAKAYIADQFRNAISQLEVICGRPFDWKKFKEVKDQTQRSVYHWNRIAEMAKYKPSPLNGFDLFNYMALIVACRSLDYAEITFKAFADELEENLKAGIYAFKGAEKTRFQWEGIAVWPHLGHTFKSMKNLNSIMTGTAYPALWDLHYDANDESMHSMAEAYTRIYINTCLQNKVEVLLGIMEKGQVDGTVYHLNRSCKLMSFLNVETAEIIKEKNGLPYVSIDGDQTDPRVFSPAQFDTRVQALVEMMEANMAAAE

SEQ ID NO: 29 - protein, 374 aa, Artificial Sequence
  Synthetic
MSRVEAILSQLKDVAANPKKAMDDYKAETGKGAVGIMPIYSPEEMVHAAGYLPMGIWGAQGKTISKARTYLPAFACSVMQQVMELQCEGAYDDLSAVIFSVPCDTLKCLSQKWKGTSPVIVFTHPQNRGLEAANQFLVTEYELVKAQLESVLGVKISNAALENSIAIYNENRAVMREFVKVAADYPQVIDAVSRHAVFKARQFMLKEKHTALVKELIAEIKATPVQPWDGKKVVVTGILLEPNELLDIFNEFKIAIVDDDLAQESRQIRVDVLDGEGGPLYRMAKAWQQMYGCSLATDTKKGRGRMLINKTIQTGADAIVVAMMKFCDPEEWDYPVMYREFEEKGVKSLMIEVDQEVSSFEQIKTRLQSFVEML

SEQ ID NO: 30 - protein, 260 aa, Artificial Sequence
  Synthetic
  misc_feature (260)..(260): Xaa can be any naturally occurring amino acid
MYTLGIDVGSASSKAVILKDGKDIVAAEVVQVGTGSSGPQRALDKAFEVSGLKKEDISYTVATGYGRFNFSDADKQISEISCHAKGIYFLVPTARTIIDIGGQDAKAIRLDDKGGIKQFFMNDKCAAGTGRFLEVMARVLETTLDEMAELDEQATDTAPISSTCTVFAESEVISQLSNGVSRNNIIKGVHLSVASRACGLAYRGGLEKDVVMTGGVAKNAGVVRAVAGVLKTDVIVAPNPQTTGALGAALYAYEAAQKKX

SEQ ID NO: 31 - protein, 367 aa, Artificial Sequence
  Synthetic
MAFNSADINSFRDIWVFCEQREGKLINTDFELISEGRKLADERGSKLVGILLGHEVEEIAKELGGYGADKVIVCDHPELKFYTTDAYAKVLCDVVMEEKPEVILIGATNIGRDLGPRCAARLHTGLTADCTHLDIDMNKYVDFLSTSSTLDISSMTFPMEDTNLKMTRPAFGGHLMATIICPRFRPCMSTVRPGVMKKAEFSQEMAQACQVVTRHVNLSDEDLKTKVINIVKETKKIVDLIGAEIIVSVGRGISKDVQGGIALAEKLADAFGNGVVGGSRAVIDSGWLPADHQVGQTGKTVHPKVYVALGISGAIQHKAGMQDSELIIAVNKDETAPIFDCADYGITGDLFKIVPMMIDAIKEGKNA

SEQ ID NO: 32 - protein, 267 aa, Artificial Sequence
  Synthetic
MRIYVCVKQVPDTSGKVAVNPDGTLNRASMAAIINPDDMSAIEQALKLKDETGCQVTALTMGPPPAEGMLREIIAMGADDGVLISAREFGGSDTFATSQIISAAIHKLGLSNEDMIFCGRQAIDGDTAQVGPQIAEKLSIPQVTYGAGIKKSGDLVLVKRMLEDGYMMIEVETPCLITCIQDKAVKPRYMTLNGIMECYSKPLLVLDYEALKDEPLIELDTIGLKGSPTNIFKSFTPPQKGVGVMLQGTDKEKVEDLVDKLMQKHVI

SEQ ID NO: 33 - protein, 394 aa, Artificial Sequence
  Synthetic
MFLLKIKKERMKRMDFSLTREQEMLKKLARQFAEIELEPVAEEIDREHVFPAENFKKMAEIGLTGIGIPKEFGGSGGGTLEKVIAVSEFGKKCMASASILSIHLIAPQAIYKYGTKEQKETYLPRLTKGGELGAFALTEPNAGSDAGAVKTTAILDSQTNEYVLNGTKCFISGGGRAGVLVIFALTEPKKGLKGMSAIIVEKGTPGFSIGKVESKMGIAGSETAELIFEDCRVPAANLLGKEGKGFKIAMEALDGARIGVGAQAIGIAEGAIDLSVKYVHERIQFGKPIANLQGIQWYIADMATKTAAARALVEFAAYLEDAGKPFTKESAMCKLNASENARFVTNLALQIHGGYGYMKDYPLERMYRDAKITEIYEGTSEIHKVVIAREVMKR

SEQ ID NO: 34 - protein, 820 aa, Artificial Sequence
  Synthetic
MRVLKFGGTSVANAERFLRVADILESNARQGQVATVLSAPAKITNHLVAMIEKTISGQDALPNISDAERIFAELLTGLAAAQPGFPLAQLKTFVDQEFAQIKHVLHGISLLGQCPDSINAALICRGEKMSIAIMAGVLEARGHNVTVIDPVEKLLAVGHYLESTVDIAESTRRIAASRIPADHMVLMAGFTAGNEKGELVVLGRNGSDYSAAVLAACLRADCCEIWTDVDGVYTCDPRQVPDARLLKSMSYQEAMELSYFGAKVLHPRTITPIAQFQIPCLIKNTGNPQAPGTLIGASRDEDELPVKGISNLNNMAMFSVSGPGMKGMVGMAARVFAAMSRARISVVLITQSSSEYSISFCVPQSDCVRAERAMQEEFYLELKEGLLEPLAVTERLAIISVVGDGMRTLRGISAKFFAALARANINIVAIAQRSSERSISVVVNNDDATTGVRVTHQMLFNTDQVIEVFVIGVGGVGGALLEQLKRQQSWLKNKHIDLRVCGVANSKALLTNVHGLNLENWQEELAQAKEPFNLGRLIRLVKEYHLLNPVIVDCTSSQAVADQYADFLREGFHVVTPNKKANTSSMDYYHQLRYAAEKSRRKFLYDTNVGAGLPVIENLQNLLNAGDELMKFSGILSGSLSYIFGKLDEGMSFSEATTLAREMGYTEPDPRDDLSGMDVARKLLILARETGRELELADIEIEPVLPAEFNAEGDVAAFMANLSQLDDLFAARVAKARDEGKVLRYVGNIDEDGVCRVKIAEVDGNDPLFKVKNGENALAFYSHYYQPLPLVLRGYGAGNDVTAAGVFADLLRTLSWKLGV

SEQ ID NO: 35 - protein, 310 aa, Artificial Sequence
  Synthetic
MVKVYAPASSANMSVGFDVLGAAVTPVDGALLGDVVTVEAAETFSLNNLGRFADKLPSEPRENIVYQCWERFCQELGKQIPVAMTLEKNMPIGSGLGSSACSVVAALMAMNEHCGKPLNDTRLLALMGELEGRISGSIHYDNVAPCFLGGMQLMIEENDIISQQVPGFDEWLWVLAYPGIKVSTAEARAILPAQYRRQDCIAHGRHLAGFIHACYSRQPELAAKLMKDVIAEPYRERLLPGFRQARQAVAEIGAVASGISGSGPTLFALCDKPETAQRVADWLGKNYLQNQEGFVHICRLDTAGARVLEN

SEQ ID NO: 36 - protein, 428 aa, Artificial Sequence
  Synthetic
MKLYNLKDHNEQVSFAQAVTQGLGKNQGLFFPHDLPEFSLTEIDEMLKLDFVTRSAKILSAFIGDEIPQEILEERVRAAFAFPAPVANVESDVGCLELFHGPTLAFKDFGGRFMAQMLTHIAGDKPVTILTATSGDTGAAVAHAFYGLPNVKVVILYPRGKISPLQEKLFCTLGGNIETVAIDGDFDACQALVKQAFDDEELKVALGLNSANSINISRLLAQICYYFEAVAQLPQETRNQLVVSVPSGNFGDLTAGLLAKSLGLPVKRFIAATNVNDTVPRFLHDGQWSPKATQATLSNAMDVSQPNNWPRVEELFRRKIWQLKELGYAAVDDETTQQTMRELKELGYTSEPHAAVAYRALRDQLNPGEYGLFLGTAHPAKFKESVEAILGETLDLPKELAERADLPLLSHNLPADFAALRKLMMNHQ

SEQ ID NO: 37 - protein, 436 aa, Artificial Sequence
  Synthetic
MSETYVSEKSPGVMASGAELIRAADIQTAQARISSVIAPTPLQYCPRLSEETGAEIYLKREDLQDVRSYKIRGALNSGAQLTQEQRDAGIVAASAGNHAQGVAYVCKSLGVQGRIYVPVQTPKQKRDRIMVHGGEFVSLVVTGNNFDEASAAAHEDAERTGATLIEPFDARNTVIGQGTVAAEILSQLTSMGKSADHVMVPVGGGGLLAGVVSYMADMAPRTAIVGIEPAGAASMQAALHNGGPITLETVDPFVDGAAVKRVGDLNYTIVEKNQGRVHMMSATEGAVCTEMLDLYQNEGIIAEPAGALSIAGLKEMSFAPGSAVVCIISGGNNDVLRYAEIAERSLVHRGLKHYFLVNFPQKPGQLRHFLEDILGPDDDITLFEYLKRNNRETGTALVGIHLSEASGLDSLLERMEESAIDSRRLEPGTPEYEYLT

SEQ ID NO: 38 - protein, 887 aa, Artificial Sequence
  Synthetic
MSERFPNDVDPIETRDWLQAIESVIREEGVERAQYLIDQLLAEARKGGVNVAAGTGISNYINTIPVEEQPEYPGNLELERRIRSAIRWNAIMTVLRASKKDLELGGHMASFQSSATIYDVCFNHFFRARNEQDGGDLVYFQGHISPGVYARAFLEGRLTQEQLDNFRQEVHGNGLSSYPHPKLMPEFWQFPTVSMGLGPIGAIYQAKFLKYLEHRGLKDTSKQTVYAFLGDGEMDEPESKGAITIATREKLDNLVFVINCNLQRLDGPVTGNGKIINELEGIFEGAGWNVIKVMWGSRWDELLRKDTSGKLIQLMNETVDGDYQTFKSKDGAYVREHFFGKYPETAALVADWTDEQIWALNRGGHDPKKIYAAFKKAQETKGKATVILAHTIKGYGMGDAAEGKNIAHQVKKMNMDGVRHIRDRFNVPVSDADIEKLPYITFPEGSEEHTYLHAQRQKLHGYLPSRQPNFTEKLELPSLQDFGALLEEQSKEISTTIAFVRALNVMLKNKSIKDRLVPIIADEARTFGMEGLFRQIGIYSPNGQQYTPQDREQVAYYKEDEKGQILQEGINELGAGCSWLAAATSYSTNNLPMIPFYIYYSMFGFQRIGDLCWAAGDQQARGFLIGGTSGRTTLNGEGLQHEDGHSHIQSLTIPNCISYDPAYAYEVAVIMHDGLERMYGEKQENVYYYITTLNENYHMPAMPEGAEEGIRKGIYKLETIEGSKGKVQLLGSGSILRHVREAAEILAKDYGVGSDVYSVTSFTELARDGQDCERWNMLHPLETPRVPYIAQVMNDAPAVASTDYMKLFAEQVRTYVPADDYRVLGTDGFGRSDSRENLRHHFEVDASYVVVAALGELAKRGEIDKKVVADAIAKFNIDADKVNPRLA

SEQ ID NO: 39 - protein, 630 aa, Artificial Sequence
  Synthetic
MAIEIKVPDIGADEVEITEILVKVGDKVEAEQSLITVEGDKASMEVPSPQAGIVKEIKVSVGDKTQTGALIMIFDSADGAADAAPAQAEEKKEAAPAAAPAAAAAKDVNVPDIGSDEVEVTEILVKVGDKVEAEQSLITVEGDKASMEVPAPFAGTVKEIKVNVGDKVSTGSLIMVFEVAGEAGAAAPAAKQEAAPAAAPAPAAGVKEVNVPDIGGDEVEVTEVMVKVGDKVAAEQSLITVEGDKASMEVPAPFAGVVKELKVNVGDKVKTGSLIMIFEVEGAAPAAAPAKQEAAAPAPAAKAEAPAAAPAAKAEGKSEFAENDAYVHATPLIRRLAREFGVNLAKVKGTGRKGRILREDVQAYVKEAIKRAEAAPAATGGGIPGMLPWPKVDFSKFGEIEEVELGRIQKISGANLSRNWVMIPHVTHFDKTDITELEAFRKQQNEEAAKRKLDVKITPVVFIMKAVAAALEQMPRFNSSLSEDGQRLTLKKYINIGVAVDTPNGLVVPVFKDVNKKGIIELSRELMTISKKARDGKLTAGEMQGGCFTISSIGGLGTTHFAPIVNAPEVAILGVSKSAMEPVWNGKEFVPRLMLPISLSFDHRVIDGADGARFITIINNTLSDIRRLVM

SEQ ID NO: 40 - protein, 474 aa, Artificial Sequence
  Synthetic
MSTEIKTQVVVLGAGPAGYSAAFRCADLGLETVIVERYNTLGGVCLNVGCIPSKALLHVAKVIEEAKALAEHGIVFGEPKTDIDKIRTWKEKVINQLTGGLAGMAKGRKVKVVNGLGKFTGANTLEVEGENGKTVINFDNAIIAAGSRPIQLPFIPHEDPRIWDSTDALELKEVPERLLVMGGGIIGLEMGTVYHALGSQIDVVEMFDQVIPAADKDIVKVFTKRISKKFNLMLETKVTAVEAKEDGIYVTMEGKKAPAEPQRYDAVLVAIGRVPNGKNLDAGKAGVEVDDRGFIRVDKQLRTNVPHIFAIGDIVGQPMLAHKGVHEGHVAAEVIAGKKHYFDPKVIPSIAYTKPEVAWVGLTEKEAKEKGISYETATFPWAASGRAIASDCADGMTKLIFDKESHRVIGGAIVGTNGGELLGEIGLAIEMGCDAEDIALTIHAHPTLHESVGLAAEVFEGSITDLPNPKAKKK

SEQ ID NO: 41 - protein, 286 aa, Artificial Sequence
  Synthetic
MSQALKNLLTLLNLEKIEEGLFRGQSEDLGLRQVFGGQVVGQALYAAKETVPEERLVHSFHSYFLRPGDSKKPIIYDVETLRDGNSFSARRVAAIQNGKPIFYMTASFQAPEAGFEHQKTMPSAPAPDGLPSETQIAQSLAHLLPPVLKDKFICDRPLEVRPVEFHNPLKGHVAEPHRQVWIRANGSVPDDLRVHQYLLGYASDLNFLPVALQPHGIGFLEPGIQIATIDHSMWFHRPFNLNEWLLYSVESTSASSARGFVRGEFYTQDGVLVASTVQEGVMRNHN

SEQ ID NO: 42 - protein, 326 aa, Artificial Sequence
  Synthetic
MRAVLIEKSDDTQSVSVTELAEDQLPEGDVLVDVAYSTLNYKDALAITGKAPVVRRFPMVPGIDFTGTVAQSSHADFKPGDRVILNGWGVGEKHWGGLAERARVRGDWLVPLPAPLDLRQAAMIGTAGYTAMLCVLALERHGVVPGNGEIVVSGAAGGVGSVATTLLAAKGYEVAAVTGRASEAEYLRGLGAASVIDRNELTGKVRPLGQERWAGGIDVAGSTVLANMLSMMKYRGVVAACGLAAGMDLPASVAPFILRGMTLAGVDSVMCPKTDRLAAWARLASDLDPAKLEEMTTELPFSEVIETAPKFLDGTVRGRIVIPVTP

SEQ ID NO: 43 - protein, 714 aa, Artificial Sequence
  Synthetic
MSNVQEWQQLANKELSRREKTVDSLVHQTAEGIAIKPLYTEADLDNLEVTGTLPGLPPYVRGPRATMYTAQPWTIRQYAGFSTAKESNAFYRRNLAAGQKGLSVAFDLATHRGYDSDNPRVAGDVGKAGVAIDTVEDMKVLFDQIPLDKMSVSMTMNGAVLPVLAFYIVAAEEQGVTPDKLTGTIQNDILKEYLCRNTYIYPPKPSMRIIADIIAWCSGNMPRFNTISISGYHMGEAGANCVQQVAFTLADGIEYIKAAISAGLKIDDFAPRLSFFFGIGMDLFMNVAMLRAARYLWSEAVSGFGAQDPKSLALRTHCQTSGWSLTEQDPYNNVIRTTIEALAATLGGTQSLHTNAFDEALGLPTDFSARIARNTQIIIQEESELCRTVDPLAGSYYIESLTDQIVKQARAIIQQIDEAGGMAKAIEAGLPKRMIEEASAREQSLIDQGKRVIVGVNKYKLDHEDETDVLEIDNVMVRNEQIASLERIRATRDDAAVTAALNALTHAAQHNENLLAAAVNAARVRATLGEISDALEVAFDRYLVPSQCVTGVIAQSYHQSEKSASEFDAIVAQTEQFLADNGRRPRILIAKMGQDGHDRGAKVIASAYSDLGFDVDLSPMFSTPEEIARLAVENDVHVVGASSLAAGHKTLIPELVEALKKWGREDICVVAGGVIPPQDYAFLQERGVAAIYGPGTPMLDSVRDVLNLISQHHD

SEQ ID NO: 44 - protein, 331 aa, Artificial Sequence
  Synthetic
MINEATLAESIRRLRQGERATLAQAMTLVESRHPRHQALSTQLLDAIMPYCGNTLRLGVTGTPGAGKSTFLEAFGMLLIREGLKVAVIAVDPSSPVTGGSILGDKTRMNDLARAEAAFIRPVPSSGHLGGASQRARELMLLCEAAGYDVVIVETVGVGQSETEVARMVDCFISLQIAGGGDDLQGIKKGLMEVADLIVINKDDGDNHTNVAIARHMYESALHILRRKYDEWQPRVLTCSALEKRGIDEIWHAIIDFKTALTASGRLQQVRQQQSVEWLRKQTEEEVLNHLFANEDFDRYYRQTLLAVKNNTLSPRTGLRQLSEFIQTQYFD

SEQ ID NO: 45 - protein, 261 aa, Artificial Sequence
  Synthetic
MSYQYVNVVTINKVAVIEFNYGRKLNALSKVFIDDLMQALSDLNRPEIRCIILRAPSGSKVFSAGHDIHELPSGGRDPLSYDDPLRQITRMIQKFPKPIISMVEGSVWGGAFEMIMSSDLIIAASTSTFSMTPVNLGVPYNLVGIHNLTRDAGFHIVKELIFTASPITAQRALAVGILNHVVEVEELEDFTLQMAHHISEKAPLAIAVIKEELRVLGEAHTMNSDEFERIQGMRRAVYDSEDYQEGMNAFLEKRKPNFVGH

SEQ ID NO: 46 - protein, 492 aa, Artificial Sequence
  Synthetic
METQWTRMTANEAAEIIQHNDMVAFSGFTPAGSPKALPTAIARRANEQHEAKKPYQIRLLTGASISAAADDVLSDADAVSWRAPYQTSSGLRKKINQGAVSFVDLHLSEVAQMVNYGFFGDIDVAVIEASALAPDGRVWLTSGIGNAPTWLLRAKKVIIELNHYHDPRVAELADIVIPGAPPRRNSVSIFHAMDRVGTRYVQIDPKKIVAVVETNLPDAGNMLDKQNPMCQQIADNVVTFLLQEMAHGRIPPEFLPLQSGVGNINNAVMARLGENPVIPPFMMYSEVLQESVVHLLETGKISGASASSLTISADSLRKIYDNMDYFASRIVLRPQEISNNPEIIRRLGVIALNVGLEFDIYGHANSTHVAGVDLMNGIGGSGDFERNAYLSIFMAPSIAKEGKISTVVPMCSHVDHSEHSVKVIITEQGIADLRGLSPLQRARTIIDNCAHPMYRDYLHRYLENAPGGHIHHDLSHVFDLHRNLIATGSMLG

SEQ ID NO: 47 - protein, 638 aa, Artificial Sequence
  Synthetic
MSSTDQGTNPADTDDLTPTTLSLAGDFPKATEEQWEREVEKVFNRGRPPEKQLTFAECLKRLTVHTVDGIDIVPMYRPKDAPKKLGYPGVTPFTRGTTVRNGDMDAWDVRALHEDPDEKFTRKAILEDLERGVTSLLLRVDPDAIAPEHLDEVLSDVLLEMTKVEVFSRYDQGAAAEALMGVYERSDKPAKDLALNLGLDPIGFAALQGTEPDLTVLGDWVRRLAKFSPDSRAVTIDANVYHNAGAGDVAELAWALATGAEYVRALVEQGFNATEAFDTINFRVTATHDQFLTIARLRALREAWARIGEVFGVDEDKRGARQNAITSWRELTREDPYVNILRGSIATFSASVGGAESITTLPFTQALGLPEDDFPLRIARNTGIVLAEEVNIGRVNDPAGGSYYVESLTRTLADAAWKEFQEVEKLGGMSKAVMTEHVTKVLDACNAERAKRLANRKQPITAVSEFPMIGARSIETKPFPTAPARKGLAWHRDSEVFEQLMDRSTSVSERPKVFLACLGTRRDFGGREGFSSPVWHIAGIDTPQVEGGTTAEIVEAFKKSGAQVADLCSSAKIYAQQGLEVAKALKAAGAKALYLSGAFKEFGDDAAEAEKLIDGRLYMGMDVVDTLSSTLDILGVAK

SEQ ID NO: 48 - protein, 728 aa, Artificial Sequence
  Synthetic
VSTLPRFDSVDLGNAPVPADAAQRFEELAAKAGTEEAWETAEQIPVGTLFNEDVYKDMDWLDTYAGIPPFVHGPYATMYAFRPWTIRQYAGFSTAKESNAFYRRNLAAGQKGLSVAFDLPTHRGYDSDNPRVAGDVGMAGVAIDSIYDMRELFAGIPLDQMSVSMTMNGAVLPILALYVVTAEEQGVKPEQLAGTIQNDILKEFMVRNTYIYPPQPSMRIISEIFAYTSANMPKWNSISISGYHMQEAGATADIEMAYTLADGVDYIRAGESVGLNVDQFAPRLSFFWGIGMNFFMEVAKLRAARMLWAKLVHQFGPKNPKSMSLRTHSQTSGWSLTAQDVYNNVVRTCIEAMAATQGHTQSLHTNSLDEAIALPTDFSARIARNTQLFLQQESGTTRVIDPWSGSAYVEELTWDLARKAWGHIQEVEKVGGMAKAIEKGIPKMRIEEAAARTQARIDSGRQPLIGVNKYRLEHEPPLDVLKVDNSTVLAEQKAKLVKLRAERDPEKVKAALDKITWAAANPDDKDPDRNLLKLCIDAGRAMATVGEMSDALEKVFGRYTAQIRTISGVYSKEVKNTPEVEEARELVEEFEQAEGRRPRILLAKMGQDGHDRGQKVIATAYADLGFDVDVGPLFQTPEETARQAVEADVHVVGVSSLAGGHLTLVPALRKELDKLGRPDILITVGGVIPEQDFDELRKDGAVEIYTPGTVIPESAISLVKKLRASLDA

SEQ ID NO: 49 - protein, 148 aa, Artificial Sequence
  Synthetic
MSNEDLFICIDHVAYACPDADEASKYYQETFGWHELHREENPEQGVVEIMMAPAAKLTEHMTQVQVMAPLNDESTVAKWLAKHNGRAGLHHMAWRVDDIDAVSATLRERGVQLLYDEPKLGTGGNRINFMHPKSGKGVLIELTQYPKN

SEQ ID NO: 50 - protein, 524 aa, Artificial Sequence
  Synthetic
MAENNNLKLASTMEGRVEQLAEQRQVIEAGGGERRVEKQHSQGKQTARERLNNLLDPHSFDEVGAFRKHRTTLFGMDKAVVPADGVVTGRGTILGRPVHAASQDFTVMGGSAGETQSTKVVETMEQALLTGTPFLFFYDSGGARIQEGIDSLSGYGKMFFANVKLSGVVPQIAIIAGPCAGGASYSPALTDFIIMTKKAHMFITGPQVIKSVTGEDVTADELGGAEAHMAISGNIHFVAEDDDAAELIAKKLLSFLPQNNTEEASFVNPNNDVSPNTELRDIVPIDGKKGYDVRDVIAKIVDWGDYLEVKAGYATNLVTAFARVNGRSVGIVANQPSVMSGCLDINASDKAAEFVNFCDSFNIPLVQLVDVPGFLPGVQQEYGGIIRHGAKMLYAYSEATVPKITVVLRKAYGGSYLAMCNRDLGADAVYAWPSAEIAVMGAEGAANVIFRKEIKAADDPDAMRAEKIEEYQNAFNTPYVAAARGQVDDVIDPADTRRKIASALEMYATKRQTRPAKKHGNFPC

SEQ ID NO: 51 - protein, 505 aa, Artificial Sequence
  Synthetic
MSPREIEVSEPREVGITELVLRDAHQSLMATRMAMEDMVGACADIDAAGYWSVECWGGATYDSCIRFLNEDPWERLRTFRKLMPNSRLQMLLRGQNLLGYRHYNDEVVDRFVDKSAENGMDVFRVFDAMNDPRNMAHAMAAVKKAGKHAQGTICYTISPVHTVEGYVKLAGQLLDMGADSIALKDMAALLKPQPAYDIIKAIKDTYGQKTQINLHCHSTTGVTEVSLMKAIEAGVDVVDTAISSMSLGPGHNPTESVAEMLEGTGYTTNLDYDRLHKIRDHFKAIRPKYKKFESKTLVDTSIFKSQIPGGMLSNMESQLRAQGAEDKMDEVMAEVPRVRKAAGFPPLVTPSSQIVGTQAVFNVMMGEYKRMTGEFADIMLGYYGASPADRDPKVVKLAEEQSGKKPITQRPADLLPPEWEEQSKEAAALKGFNGTDEDVLTYALFPQVAPVFFEHRAEGPHSVALTDAQLKAEAEGDEKSLAVAGPVTYNVNVGGTVREVTVQQA

SEQ ID NO: 52 - protein, 123 aa, Artificial Sequence
  Synthetic
MKLKVTVNGTAYDVDVDVDKSHENPMGTILFGGGTGGAPAPRAAGGAGAGKAGEGEIPAPLAGTVSKILVKEGDTVKAGQTVLVLEAMKMETEINAPTDGKVEKVLVKERDAVQGGQGLIKIG

SEQ ID NO: 53 - DNA, 1137 bp, Artificial Sequence
  Synthetic
atggatttaaattctaaaaaatatcagatgcttaaagagctatatgtaagcttcgctgaaaatgaagttaaacctttagcaacagaacttgatgaagaagaaagatttccttatgaaacagtggaaaaaatggcaaaagcaggaatgatgggtataccatatccaaaagaatatggtggagaaggtggagacactgtaggatatataatggcagttgaagaattgtctagagtttgtggtactacaggagttatattatcagctcatacatctcttggctcatggcctatatatcaatatggtaatgaagaacaaaaacaaaaattcttaagaccactagcaagtggagaaaaattaggagcatttggtcttactgagcctaatgctggtacagatgcgtctggccaacaaacaactgctgttttagacggggatgaatacatacttaatggctcaaaaatatttataacaaacgcaatagctggtgacatatatgtagtaatggcaatgactgataaatctaaggggaacaaaggaatatcagcatttatagttgaaaaaggaactcctgggtttagctttggagttaaagaaaagaaaatgggtataagaggttcagctacgagtgaattaatatttgaggattgcagaatacctaaagaaaatttacttggaaaagaaggtcaaggatttaagatagcaatgtctactcttgatggtggtagaattggtatagctgcacaagctttaggtttagcacaaggtgctcttgatgaaactgttaaatatgtaaaagaaagagtacaatttggtagaccattatcaaaattccaaaatacacaattccaattagctgatatggaagttaaggtacaagcggctagacaccttgtatatcaagcagctataaataaagacttaggaaaaccttatggagtagaagcagcaatggcaaaattatttgcagctgaaacagctatggaagttactacaaaagctgtacaacttcatggaggatatggatacactcgtgactatccagtagaaagaatgatgagagatgctaagataactgaaatatatgaaggaactagtgaagttcaaagaatggttatttcaggaaaactattaaaatag

SEQ ID NO: 54 - DNA, 783 bp, Artificial Sequence
  Synthetic
atgaatatagtcgtttgtataaaacaagttccagatacaacagaagttaaactagatcctaatacaggtactttaattagagatggagtaccaagtataataaaccctgatgataaagcaggtttagaagaagctataaaattaaaagaagaaatgggtgctcatgtaactgttataacaatgggacctcctcaagcagatatggctttaaaagaagctttagcaatgggtgcagatagaggtatattattaacagatagagcatttgcgggtgctgatacttgggcaacttcatcagcattagcaggagcattaaaaaatatagattttgatattataatagctggaagacaggcgatagatggagatactgcacaagttggacctcaaatagctgaacatttaaatcttccatcaataacatatgctgaagaaataaaaactgaaggtgaatatgtattagtaaaaagacaatttgaagattgttgccatgacttaaaagttaaaatgccatgccttataacaactcttaaagatatgaacacaccaagatacatgaaagttggaagaatatatgatgctttcgaaaatgatgtagtagaaacatggactgtaaaagatatagaagttgacccttctaatttaggtcttaaaggttctccaactagtgtatttaaatcatttacaaaatcagttaaaccagctggtacaatatacaatgaagatgcgaaaacatcagctggaattatcatagataaattaaaagagaagtatatcatataa

SEQ ID NO: 55 - DNA, 1011 bp, Artificial Sequence
  Synthetic
atgggtaacgttttagtagtaatagaacaaagagaaaatgtaattcaaactgtttctttagaattactaggaaaggctacagaaatagcaaaagattatgatacaaaagtttctgcattacttttaggtagtaaggtagaaggtttaatagatacattagcacactatggtgcagatgaggtaatagtagtagatgatgaagctttagcagtgtatacaactgaaccatatacaaaagcagcttatgaagcaataaaagcagctgaccctatagttgtattatttggtgcaacttcaataggtagagatttagcgcctagagtttctgctagaatacatacaggtcttactgctgactgtacaggtcttgcagtagctgaagatacaaaattattattaatgacaagacctgcctttggtggaaatataatggcaacaatagtttgtaaagatttcagacctcaaatgtctacagttagaccaggggttatgaagaaaaatgaacctgatgaaactaaagaagctgtaattaaccgtttcaaggtagaatttaatgatgctgataaattagttcaagttgtacaagtaataaaagaagctaaaaaacaagttaaaatagaagatgctaagatattagtttctgctggacgtggaatgggtggaaaagaaaacttagacatactttatgaattagctgaaattataggtggagaagtttctggttctcgtgccactatagatgcaggttggttagataaagcaagacaagttggtcaaactggtaaaactgtaagaccagacctttatatagcatgtggtatatctggagcaatacaacatatagctggtatggaagatgctgagtttatagttgctataaataaaaatccagaagctccaatatttaaatatgctgatgttggtatagttggagatgttcataaagtgcttccagaacttatcagtcagttaagtgttgcaaaagaaaaaggtgaagttttagctaactaa

SEQ ID NO: 56 - DNA, 1176 bp, Artificial Sequence
  Synthetic
atgagagaagtagtaattgccagtgcagctagaacagcagtaggaagttttggaggagcatttaaatcagtttcagcggtagagttaggggtaacagcagctaaagaagctataaaaagagctaacataactccagatatgatagatgaatctcttttagggggagtacttacagcaggtcttggacaaaatatagcaagacaaatagcattaggagcaggaataccagtagaaaaaccagctatgactataaatatagtttgtggttctggattaagatctgtttcaatggcatctcaacttatagcattaggtgatgctgatataatgttagttggtggagctgaaaacatgagtatgtctccttatttagtaccaagtgcgagatatggtgcaagaatgggtgatgctgcttttgttgattcaatgataaaagatggattatcagacatatttaataactatcacatgggtattactgctgaaaacatagcagagcaatggaatataactagagaagaacaagatgaattagctcttgcaagtcaaaataaagctgaaaaagctcaagctgaaggaaaatttgatgaagaaatagttcctgttgttataaaaggaagaaaaggtgacactgtagtagataaagatgaatatattaagcctggcactacaatggagaaacttgctaagttaagacctgcatttaaaaaagatggaacagttactgctggtaatgcatcaggaataaatgatggtgctgctatgttagtagtaatggctaaagaaaaagctgaagaactaggaatagagcctcttgcaactatagtttcttatggaacagctggtgttgaccctaaaataatgggatatggaccagttccagcaactaaaaaagctttagaagctgctaatatgactattgaagatatagatttagttgaagctaatgaggcatttgctgcccaatctgtagctgtaataagagacttaaatatagatatgaataaagttaatgttaatggtggagcaatagctataggacatccaataggatgctcaggagcaagaatacttactacacttttatatgaaatgaagagaagagatgctaaaactggtcttgctacactttgtataggcggtggaatgggaactactttaatagttaagagatag

SEQ ID NO: 57 - DNA, 846 bp, Artificial Sequence
  Synthetic
atgaaattagctgtaataggtagtggaactatgggaagtggtattgtacaaacttttgcaagttgtggacatgatgtatgtttaaagagtagaactcaaggtgctatagataaatgtttagctttattagataaaaatttaactaagttagttactaagggaaaaatggatgaagctacaaaagcagaaatattaagtcatgttagttcaactactaattatgaagatttaaaagatatggatttaataatagaagcatctgtagaagacatgaatataaagaaagatgttttcaagttactagatgaattatgtaaagaagatactatcttggcaacaaatacttcatcattatctataacagaaatagcttcttctactaagcgcccagataaagttataggaatgcatttctttaatccagttcctatgatgaaattagttgaagttataagtggtcagttaacatcaaaagttacttttgatacagtatttgaattatctaagagtatcaataaagtaccagtagatgtatctgaatctcctggatttgtagtaaatagaatacttatacctatgataaatgaagctgttggtatatatgcagatggtgttgcaagtaaagaagaaatagatgaagctatgaaattaggagcaaaccatccaatgggaccactagcattaggtgatttaatcggattagatgttgttttagctataatgaacgttttatatactgaatttggagatactaaatatagacctcatccacttttagctaaaatggttagagctaatcaattaggaagaaaaactaagataggattctatgattataataaataa

SEQ ID NO: 58 - DNA, 798 bp, Artificial Sequence
  Synthetic
atgagtacaagtgatgttaaagtttatgagaatgtagctgttgaagtagatggaaatatatgtacagtgaaaatgaatagacctaaagcccttaatgcaataaattcaaagactttagaagaactttatgaagtatttgtagatattaataatgatgaaactattgatgttgtaatattgacaggggaaggaaaggcatttgtagctggagcagatattgcatacatgaaagatttagatgctgtagctgctaaagattttagtatcttaggagcaaaagcttttggagaaatagaaaatagtaaaaaagtagtgatagctgctgtaaacggatttgctttaggtggaggatgtgaacttgcaatggcatgtgatataagaattgcatctgctaaagctaaatttggtcagccagaagtaactcttggaataactccaggatatggaggaactcaaaggcttacaagattggttggaatggcaaaagcaaaagaattaatctttacaggtcaagttataaaagctgatgaagctgaaaaaatagggctagtaaatagagtcgttgagccagacattttaatagaagaagttgagaaattagctaagataatagctaaaaatgctcagcttgcagttagatactctaaagaagcaatacaacttggtgctcaaactgatataaatactggaatagatatagaatctaatttatttggtctttgtttttcaactaaagaccaaaaagaaggaatgtcagctttcgttgaaaagagagaagctaactttataaaagggtaa

SEQ ID NO: 59 - DNA, 903 bp, Artificial Sequence
  Synthetic
atgagaagttttgaagaagtaattaagtttgcaaaagaaagaggacctaaaactatatcagtagcatgttgccaagataaagaagttttaatggcagttgaaatggctagaaaagaaaaaatagcaaatgccattttagtaggagatatagaaaagactaaagaaattgcaaaaagcatagacatggatatcgaaaattatgaactgatagatataaaagatttagcagaagcatctctaaaatctgttgaattagtttcacaaggaaaagccgacatggtaatgaaaggcttagtagacacatcaataatactaaaagcagttttaaataaagaagtaggtcttagaactggaaatgtattaagtcacgtagcagtatttgatgtagagggatatgatagattatttttcgtaactgacgcagctatgaacttagctcctgatacaaatactaaaaagcaaatcatagaaaatgcttgcacagtagcacattcattagatataagtgaaccaaaagttgctgcaatatgcgcaaaagaaaaagtaaatccaaaaatgaaagatacagttgaagctaaagaactagaagaaatgtatgaaagaggagaaatcaaaggttgtatggttggtgggccttttgcaattgataatgcagtatctttagaagcagctaaacataaaggtataaatcatcctgtagcaggacgagctgatatattattagccccagatattgaaggtggtaacatattatataaagctttggtattcttctcaaaatcaaaaaatgcaggagttatagttggggctaaagcaccaataatattaacttctagagcagacagtgaagaaactaaactaaactcaatagctttaggtgttttaatggcagcaaaggcataa

SEQ ID NO: 60 - DNA, 1080 bp, Artificial Sequence
  Synthetic
atgagcaaaatatttaaaatcttaacaataaatcctggttcgacatcaactaaaatagctgtatttgataatgaggatttagtatttgaaaaaactttaagacattcttcagaagaaataggaaaatatgagaaggtgtctgaccaatttgaatttcgtaaacaagtaatagaagaagctctaaaagaaggtggagtaaaaacatctgaattagatgctgtagtaggtagaggaggacttcttaaacctataaaaggtggtacttattcagtaagtgctgctatgattgaagatttaaaagtgggagttttaggagaacacgcttcaaacctaggtggaataatagcaaaacaaataggtgaagaagtaaatgttccttcatacatagtagaccctgttgttgtagatgaattagaagatgttgctagaatttctggtatgcctgaaataagtagagcaagtgtagtacatgctttaaatcaaaaggcaatagcaagaagatatgctagagaaataaacaagaaatatgaagatataaatcttatagttgcacacatgggtggaggagtttctgttggagctcataaaaatggtaaaatagtagatgttgcaaacgcattagatggagaaggacctttctctccagaaagaagtggtggactaccagtaggtgcattagtaaaaatgtgctttagtggaaaatatactcaagatgaaattaaaaagaaaataaaaggtaatggcggactagttgcatacttaaacactaatgatgctagagaagttgaagaaagaattgaagctggtgatgaaaaagctaaattagtatatgaagctatggcatatcaaatctctaaagaaataggagctagtgctgcagttcttaagggagatgtaaaagcaatattattaactggtggaatcgcatattcaaaaatgtttacagaaatgattgcagatagagttaaatttatagcagatgtaaaagtttatccaggtgaagatgaaatgattgcattagctcaaggtggacttagagttttaactggtgaagaagaggctcaagtttatgataactaa

SEQ ID NO: 61 - DNA, 1194 bp, Artificial Sequence
  Synthetic
atgatcgtaaaacctatggtacgcaacaatatctgcctgaacgcccatcctcagggctgcaagaagggagtggaagatcagattgaatataccaagaaacgcattaccgcagaagtcaaagctggcgcaaaagctccaaaaaacgttctggtgcttggctgctcaaatggttacggcctggcgagccgcattactgctgcgttcggatacggggctgcgaccatcggcgtgtcctttgaaaaagcgggttcagaaaccaaatatggtacaccgggatggtacaataatttggcatttgatgaagcggcaaaacgcgagggtctttatagcgtgacgatcgacggcgatgcgttttcagacgagatcaaggcccaggtaattgaggaagccaaaaaaaaaggtatcaaatttgatctgatcgtatacagcttggccagcccagtacgtactgatcctgatacaggtatcatgcacaaaagcgttttgaaaccctttggaaaaacgttcacaggcaaaacagtagatccgtttactggcgagctgaaggaaatctccgcggaaccagcaaatgacgaggaagcagccgccactgttaaagttatggggggtgaagattgggaacgttggattaagcagctgtcgaaggaaggcctcttagaagaaggctgtattaccttggcctatagttatattggccctgaagctacccaagctttgtaccgtaaaggcacaatcggcaaggccaaagaacacctggaggccacagcacaccgtctcaacaaagagaacccgtcaatccgtgccttcgtgagcgtgaataaaggcctggtaacccgcgcaagcgccgtaatcccggtaatccctctgtatctcgccagcttgttcaaagtaatgaaagagaagggcaatcatgaaggttgtattgaacagatcacgcgtctgtacgccgagcgcctgtaccgtaaagatggtacaattccagttgatgaggaaaatcgcattcgcattgatgattgggagttagaagaagacgtccagaaagcggtatccgcgttgatggagaaagtcacgggtgaaaacgcagaatctctcactgacttagcggggtaccgccatgatttcttagctagtaacggctttgatgtagaaggtattaattatgaagcggaagttgaacgcttcgaccgtatctga

SEQ ID NO: 62 - protein, 378 aa, Artificial Sequence
  Synthetic
MDLNSKKYQMLKELYVSFAENEVKPLATELDEEERFPYETVEKMAKAGMMGIPYPKEYGGEGGDTVGYIMAVEELSRVCGTTGVILSAHTSLGSWPIYQYGNEEQKQKFLRPLASGEKLGAFGLTEPNAGTDASGQQTTAVLDGDEYILNGSKIFITNAIAGDIYVVMAMTDKSKGNKGISAFIVEKGTPGFSFGVKEKKMGIRGSATSELIFEDCRIPKENLLGKEGQGFKIAMSTLDGGRIGIAAQALGLAQGALDETVKYVKERVQFGRPLSKFQNTQFQLADMEVKVQAARHLVYQAAINKDLGKPYGVEAAMAKLFAAETAMEVTTKAVQLHGGYGYTRDYPVERMMRDAKITEIYEGTSEVQRMVISGKLLK

SEQ ID NO: 63 - protein, 260 aa, Artificial Sequence
  Synthetic
MNIVVCIKQVPDTTEVKLDPNTGTLIRDGVPSIINPDDKAGLEEAIKLKEEMGAHVTVITMGPPQADMALKEALAMGADRGILLTDRAFAGADTWATSSALAGALKNIDFDIIIAGRQAIDGDTAQVGPQIAEHLNLPSITYAEEIKTEGEYVLVKRQFEDCCHDLKVKMPCLITTLKDMNTPRYMKVGRIYDAFENDVVETWTVKDIEVDPSNLGLKGSPTSVFKSFTKSVKPAGTIYNEDAKTSAGIIIDKLKEKYII

SEQ ID NO: 64 - protein, 336 aa, Artificial Sequence
  Synthetic
MGNVLVVIEQRENVIQTVSLELLGKATEIAKDYDTKVSALLLGSKVEGLIDTLAHYGADEVIVVDDEALAVYTTEPYTKAAYEAIKAADPIVVLFGATSIGRDLAPRVSARIHTGLTADCTGLAVAEDTKLLLMTRPAFGGNIMATIVCKDFRPQMSTVRPGVMKKNEPDETKEAVINRFKVEFNDADKLVQVVQVIKEAKKQVKIEDAKILVSAGRGMGGKENLDILYELAEIIGGEVSGSRATIDAGWLDKARQVGQTGKTVRPDLYIACGISGAIQHIAGMEDAEFIVAINKNPEAPIFKYADVGIVGDVHKVLPELISQLSVAKEKGEVLAN

SEQ ID NO: 65 - protein, 397 aa, Artificial Sequence
  Synthetic
MIVKPMVRNNICLNAHPQGCKKGVEDQIEYTKKRITAEVKAGAKAPKNVLVLGCSNGYGLASRITAAFGYGAATIGVSFEKAGSETKYGTPGWYNNLAFDEAAKREGLYSVTIDGDAFSDEIKAQVIEEAKKKGIKFDLIVYSLASPVRTDPDTGIMHKSVLKPFGKTFTGKTVDPFTGELKEISAEPANDEEAAATVKVMGGEDWERWIKQLSKEGLLEEGCITLAYSYIGPEATQALYRKGTIGKAKEHLEATAHRLNKENPSIRAFVSVNKGLVTRASAVIPVIPLYLASLFKVMKEKGNHEGCIEQITRLYAERLYRKDGTIPVDEENRIRIDDWELEEDVQKAVSALMEKVTGENAESLTDLAGYRHDFLASNGFDVEGINYEAEVERFDRI

SEQ ID NO: 66 - protein, 391 aa, Artificial Sequence
  Synthetic
MREVVIASAARTAVGSFGGAFKSVSAVELGVTAAKEAIKRANITPDMIDESLLGGVLTAGLGQNIARQIALGAGIPVEKPAMTINIVCGSGLRSVSMASQLIALGDADIMLVGGAENMSMSPYLVPSARYGARMGDAAFVDSMIKDGLSDIFNNYHMGITAENIAEQWNITREEQDELALASQNKAEKAQAEGKFDEEIVPVVIKGRKGDTVVDKDEYIKPGTTMEKLAKLRPAFKKDGTVTAGNASGINDGAAMLVVMAKEKAEELGIEPLATIVSYGTAGVDPKIMGYGPVPATKKALEAANMTIEDIDLVEANEAFAAQSVAVIRDLNIDMNKVNVNGGAIAIGHPIGCSGARILTTLLYEMKRRDAKTGLATLCIGGGMGTTLIVKR

SEQ ID NO: 67 - protein, 281 aa, Artificial Sequence
  Synthetic
MKLAVIGSGTMGSGIVQTFASCGHDVCLKSRTQGAIDKCLALLDKNLTKLVTKGKMDEATKAEILSHVSSTTNYEDLKDMDLIIEASVEDMNIKKDVFKLLDELCKEDTILATNTSSLSITEIASSTKRPDKVIGMHFFNPVPMMKLVEVISGQLTSKVTFDTVFELSKSINKVPVDVSESPGFVVNRILIPMINEAVGIYADGVASKEEIDEAMKLGANHPMGPLALGDLIGLDVVLAIMNVLYTEFGDTKYRPHPLLAKMVRANQLGRKTKIGFYDYNK

SEQ ID NO: 68 - protein, 265 aa, Artificial Sequence
  Synthetic
MSTSDVKVYENVAVEVDGNICTVKMNRPKALNAINSKTLEELYEVFVDINNDETIDVVILTGEGKAFVAGADIAYMKDLDAVAAKDFSILGAKAFGEIENSKKVVIAAVNGFALGGGCELAMACDIRIASAKAKFGQPEVTLGITPGYGGTQRLTRLVGMAKAKELIFTGQVIKADEAEKIGLVNRVVEPDILIEEVEKLAKIIAKNAQLAVRYSKEAIQLGAQTDINTGIDIESNLFGLCFSTKDQKEGMSAFVEKREANFIKG

SEQ ID NO: 69 - protein, 300 aa, Artificial Sequence
  Synthetic
MRSFEEVIKFAKERGPKTISVACCQDKEVLMAVEMARKEKIANAILVGDIEKTKEIAKSIDMDIENYELIDIKDLAEASLKSVELVSQGKADMVMKGLVDTSIILKAVLNKEVGLRTGNVLSHVAVFDVEGYDRLFFVTDAAMNLAPDTNTKKQIIENACTVAHSLDISEPKVAAICAKEKVNPKMKDTVEAKELEEMYERGEIKGCMVGGPFAIDNAVSLEAAKHKGINHPVAGRADILLAPDIEGGNILYKALVFFSKSKNAGVIVGAKAPIILTSRADSEETKLNSIALGVLMAAKA

SEQ ID NO: 70 - protein, 359 aa, Artificial Sequence
  Synthetic
MSKIFKILTINPGSTSTKIAVFDNEDLVFEKTLRHSSEEIGKYEKVSDQFEFRKQVIEEALKEGGVKTSELDAVVGRGGLLKPIKGGTYSVSAAMIEDLKVGVLGEHASNLGGIIAKQIGEEVNVPSYIVDPVVVDELEDVARISGMPEISRASVVHALNQKAIARRYAREINKKYEDINLIVAHMGGGVSVGAHKNGKIVDVANALDGEGPFSPERSGGLPVGALVKMCFSGKYTQDEIKKKIKGNGGLVAYLNTNDAREVEERIEAGDEKAKLVYEAMAYQISKEIGASAAVLKGDVKAILLTGGIAYSKMFTEMIADRVKFIADVKVYPGEDEMIALAQGGLRVLTGEEEAQVYDN

SEQ ID NO: 71 - DNA, 114 bp, Artificial Sequence
  Synthetic
atggacgagttcgaacgccacgcggagggaactttcacttctgatgtttctagctatttggagggccaggctgcgaaagagtttattgcttggctggttaaaggtcgtggttaa

SEQ ID NO: 72 - DNA, 111 bp, Artificial Sequence
  Synthetic
gacgagttcgaacgccacgcggagggaactttcacttctgatgtttctagctatttggagggccaggctgcgaaagagtttattgcttggctggttaaaggtcgtggttaa

SEQ ID NO: 73 - protein, 37 aa, Artificial Sequence
  Synthetic
HDEFERHAEGTFTSDVSSYLEGQAAKEFIAWLVKGRG

SEQ ID NO: 74 - protein, 37 aa, Artificial Sequence
  Synthetic
MDEFERHAEGTFTSDVSSYLEGQAAKEFIAWLVKGRG

SEQ ID NO: 75 - protein, 31 aa, Artificial Sequence
  Synthetic
HAEGTFTSDVSSYLEGQAAKEFIAWLVKGRG

SEQ ID NO: 76 - protein, 30 aa, Artificial Sequence
  Synthetic
HAEGTFTSDVSSYLEGQAAKEFIAWLVKGR

SEQ ID NO: 77 - protein, 180 aa, Artificial Sequence
  Synthetic
MKSIYFVAGLFVMLVQGSWQRSLQDTEEKSRSFSASQADPLSDPDQMNEDKRHSQGTFTSDYSKYLDSRRAQDFVQWLMNTKRNRNNIAKRHDEFERHAEGTFTSDVSSYLEGQAAKEFIAWLVKGRGRRDFPEEVAIVEELGRRHADGSFSDEMNTILDNLAARDFINWLIQTKITDRK

SEQ ID NO: 78 - protein, 160 aa, Artificial Sequence
  Synthetic
RSLQDTEEKSRSFSASQADPLSDPDQMNEDKRHSQGTFTSDYSKYLDSRRAQDFVQWLMNTKRNRNNIAKRHDEFERHAEGTFTSDVSSYLEGQAAKEFIAWLVKGRGRRDFPEEVAIVEELGRRHADGSFSDEMNTILDNLAARDFINWLIQTKITDRK

SEQ ID NO: 79 - protein, 29 aa, Artificial Sequence
  Synthetic
HSQGTFTSDYSKYLDSRRAQDFVQWLMNT

SEQ ID NO: 80 - protein, 69 aa, Artificial Sequence
  Synthetic
RSLQDTEEKSRSFSASQADPLSDPDQMNEDKRHSQGTFTSDYSKYLDSRRAQDFVQWLMNTKRNRNNIA

SEQ ID NO: 81 - protein, 30 aa, Artificial Sequence
  Synthetic
RSLQDTEEKSRSFSASQADPLSDPDQMNED

SEQ ID NO: 82 - protein, 37 aa, Artificial Sequence
  Synthetic
HSQGTFTSDYSKYLDSRRAQDFVQWLMNTKRNRNNIA

SEQ ID NO: 83 - protein, 39 aa, Artificial Sequence
  Synthetic
HGEGTFTSDLSKQMEEEAVRLFIEWLKNGGPSSGAPPPS

SEQ ID NO: 84 - protein, 33 aa, Artificial Sequence
  Synthetic
HAEGTFTSDVSSYLEGQAAKEEFIIAWLVKGRG

SEQ ID NO: 85 - protein, 44 aa, Artificial Sequence
  Synthetic
HGEGTFTSDLSKQMEEEAVRLFIEWLKNGGPSSGAPPSKKKKKK

SEQ ID NO: 86 - protein, 645 aa, Artificial Sequence
  Synthetic
HGEGTFTSDVSSYLEGQAAKEFIAWLVKGRHGEGTFTSDVSSYLEGQAAKEFIAWLVKGRDAHKSEVAHRFKDLGEENFKALVLIAFAQYLQQCPFEDHVKLVNEVTEFAKTCVADESAENCDKSLHTLFGDKLCTVATLRETYGEMADCCAKQEPERNECFLQHKDDNPNLPRLVRPEVDVMCTAFHDNEETFLKKYLYEIARRHPYFYAPELLFFAKRYKAAFTECCQAADKAACLLPKLDELRDEGKASSAKQRLKCASLQKFGERAFKAWAVARLSQRFPKAEFAEVSKLVTDLTKVHTECCHGDLLECADDRADLAKYICENQDSISSKLKECCEKPLLEKSHCIAEVENDEMPADLPSLAADFVESKDVCKNYAEAKDVFLGMFLYEYARRHPDYSVVLLLRLAKTYETTLEKCCAAADPHECYAKVFDEFKPLVEEPQNLIKQNCELFEQLGEYKFQNALLVRYTKKVPQVSTPTLVEVSRNLGKVGSKCCKHPEAKRMPCAEDYLSVVLNQLCVLHEKTPVSDRVTKCCTESLVNRRPCFSALEVDETYVPKEFNAETFTFHADICTLSEKERQIKKQTALVELVKHKPKATKEQLKAVMDDFAAFVEKCCKADDKETCFAEEGKKLVAASQAALGL

SEQ ID NO: 87 - protein, 275 aa, Artificial Sequence
  Synthetic
HGEGTFTSDVSSYLEEQAAKEFIAWLVKGGGGGGGSGGGGSGGGGSAESKYGPPCPPCPAPEAAGGPSVFLFPPKPKDTLMISRTPEVTCVVVDVSQEDPEVQFNWYVDGVEVHNAKTKPREEQFNSTYRVVSVLTVLHQDWLNGKEYKCKVSNKGLPSSIEKTISKAKGQPREPQVYTLPPSQEEMTKNQVSLTCLVKGFYPSDIAVEWESNGQPENNYKTTPPVLDSDGSFFLYSRLTVDKSRWQEGNVFSCSVMHEALHNHYTQKSLSLSLG

SEQ ID NO: 88 - protein, 30 aa, Artificial Sequence
  Synthetic
  misc_feature (1)..(30): Any Xaa is Aib
HXEGTFTSDVSSYLEGQAAKEFIAWLVKXR

SEQ ID NO: 89 - protein, 463 aa, Artificial Sequence
  Synthetic
MAGAPGPLRLALLLLGMVGRAGPRPQGATVSLWETVQKWREYRRQCQRSLTEDPPPATDLFCNRTFDEYACWPDGEPGSFVNVSCPWYLPWASSVPQGHVYRFCTAEGLWLQKDNSSLPWRDLSECEESKRGERSSPEEQLLFLYIIYTVGYALSFSALVIASAILLGFRHLHCTRNYIHLNLFASFILRALSVFIKDAALKWMYSTAAQQHQWDGLLSYQDSLSCRLVFLLMQYCVAANYYWLLVEGVYLYTLLAFSVLSEQWIFRLYVSIGWGVPLLFVVPWGIVKYLYEDEGCWTRNSNMNYWLIIRLPILFAIGVNFLIFVRVICIVVSKLKANLMCKTDIKCRLAKSTLTLIPLLGTHEVIFAFVMDEHARGTLRFIKLFTELSFTSFQGLMVAILYCFVNNEVQLEFRKSWERWRLEHLHIQRDSSMKPLKCPTSSLSSGATAGSSMYTATCQASCS

SEQ ID NO: 90 - DNA, 975 bp, Lactobacillus plantarum
atgtgtactgccataacttatcaatcttataataattacttcggtagaaatttcgattatgaaatttcatacaatgaaatggttacgattacgcctagaaaatatccactagtatttcgtaaggtggagaacttagatcaccattatgcaataattggaattactgctgatgtagaaagctatccactttactacgatgcgatgaatgaaaaaggcttgtgtattgcgggattaaattttgcaggttatgctgattataaaaaatatgatgctgataaagttaatatcacaccatttgaattaattccttggttattgggacaattttcaagtgttagagaagtgaaaaagaacatacaaaaactaaacttggttaatattaattttagtgaacaattaccattatcaccgctacattggttggttgctgataaacaggaatcgatagttattgaaagtgtcaaagaaggactaaaaatttacgacaatccagtaggtgtgttaacaaacaatcctaattttgactaccaattatttaatttgaacaactatcgtgccttatcaaatagcacaccccaaaatagtttttcggaaaaagtggatttagatagttatagtagaggaatgggcggactaggattacctggagacttgtcctcaatgtctagatttgtcagagccgcttttactaaattaaactcgttgtcgatgcagacagagagtggcagtgttagtcagtttttccatatactagggtctgtagaacaacaaaaagggctatgtgaagttactgacggaaagtacgaatatacaatctattcttcttgttgtgatatggacaaaggagtttattactatagaacttatgacaatagtcaaattaacagtgtcagtttaaaccatgagcacttggatacgactgaattaatttcttatccattacgatcagaagcacaatactatgcagttaactaa

SEQ ID NO: 91 - protein, 324 aa, Lactobacillus plantarum
MCTAITYQSYNNYFGRNFDYEISYNEMVTITPRKYPLVFRKVENLDHHYAIIGITADVESYPLYYDAMNEKGLCIAGLNFAGYADYKKYDADKVNITPFELIPWLLGQFSSVREVKKNIQKLNLVNINFSEQLPLSPLHWLVADKQESIVIESVKEGLKIYDNPVGVLTNNPNFDYQLFNLNNYRALSNSTPQNSFSEKVDLDSYSRGMGGLGLPGDLSSMSRFVRAAFTKLNSLSMQTESGSVSQFFHILGSVEQQKGLCEVTDGKYEYTIYSSCCDMDKGVYYYRTYDNSQINSVSLNHEHLDTTELISYPLRSEAQYYAVN

SEQ ID NO: 92 - DNA, 951 bp, Methanobrevibacter smithii 3142
atgtgtactgctgcaaattatttaacaaaatgccattattttggccgtaattttgactatgaaatttcatataatgaaagagtaacgataactcctagaaactatcctttaatattcagggatactgaggacattgaaaatcattatgggattattggcatagctgcaggtattgatgaatatcctttgtattatgatgcatgtaatgagaaaggattagctatggggggattaaactttccggattactgtgactacaaaccactagataaatctaaagttaacatagcttcttttgagattattccatatatattatctcaagcaaaaaccatcagtgatgccgaaaggttattggaaaacttaaatatttcagatgagaaattttccgcccagttgcctccatctccacttcattggattatttcagataggaatgcttcaattgttgtagaggttgtagaggaaggactggatatttatgataatcctgtaggagttttaacaaacaaccctccttttgataaacagctatttaatttaaataattatatggcattatcaaacagaacgcctgaaaatacctttggaggcaatttggatttggcaacttatagtcggggaatgggttcaattggtcttccgggggatgtttcttcacagtcccgttttgtaaaagcagcttttgttaaagaaaattccgtttccggagattctgaaaaagaaagtgtgtctcagtttttccatattctggcatctgttgaacagcaaaaaggatgtacgttagtggaagaacctgataaatttgagtatactatttattcagactgttacaatacagataagggaatattgtattataaaacatatgatggtcctcaaacatctgttaatatacatgatgaggatttggaaaccaatcagttaattaattttgagttggttgattaa

SEQ ID NO: 93 - protein, 316 aa, Methanobrevibacter smithii 3142
MCTAANYLTKCHYFGRNFDYEISYNERVTITPRNYPLIFRDTEDIENHYGIIGIAAGIDEYPLYYDACNEKGLAMGGLNFPDYCDYKPLDKSKVNIASFEIIPYILSQAKTISDAERLLENLNISDEKFSAQLPPSPLHWIISDRNASIVVEVVEEGLDIYDNPVGVLTNNPPFDKQLFNLNNYMALSNRTPENTFGGNLDLATYSRGMGSIGLPGDVSSQSRFVKAAFVKENSVSGDSEKESVSQFFHILASVEQQKGCTLVEEPDKFEYTIYSDCYNTDKGILYYKTYDGPQTSVNIHDEDLETNQLINFELVD

SEQ ID NO: 94 - DNA, 1080 bp, Bacteroides vulgatus
atggttatgaaaaagattttgatagctttggccttattgctgacaggcattgcaagcggatcggcatgtaccggtatttcattcctcgctgaagatggcggatatgtgcaggcacgtactatagagtgggggaacagttatcttccgagtgaatatgttattgttcccagaggacaggatttggtatcttatactccaacgggtgtaaatggcttgagatttcgggctaaatatggtctggtaggactggctatcattcagaaagagtttgtggctgaaggactgaatgaagtagggctttcggctggattgttttattttccccattatgggaagtatgaagaatatgatgaggctcaaaatgcaattactttgtcggatttgcaggtggtgaactggatgctttcccaatttgctactatagacgaagtgagagaagctatagaaggggtgaaggtggtgtctcttgataaacctggtaaaagttctacggtacattggcgcattggcgatgctaaaggaaatcaaatggtgttggaatttgtaggtggtgttccttatttttatgaaaataaagtaggagtactcaccaattctcccgattttccatggcaggtgattaacttgaataattatgtaaatctatatccgggagctgtcactccacagcaatggggtggggtgactattttcccttttggcgcaggtgccggatttcatggtattccgggggatgtaactcctccatcccgttttgttcgtgtagcgttttataaggcaacagctccggtgtgtcctacagcgtatgacgctatattacaaagctttcatatcctgaataattttgatattcctattggtatagaatatgcgttagggaaagcacctgatattcctagtgccacacaatggacttcggctattgatttgacaaacaggaaagtgtattataaaacagcatacaataacaatattcgttgtattagtatgaagaagattgattttgataaagtgaagtatcagtcgtatccattggataaggagttgaaacagcctgtagaagagattattgtgaaatag

SEQ ID NO: 95 - protein, 359 aa, Bacteroides vulgatus
MVMKKILIALALLLTGIASGSACTGISFLAEDGGYVQARTIEWGNSYLPSEYVIVPRGQDLVSYTPTGVNGLRFRAKYGLVGLAIIQKEFVAEGLNEVGLSAGLFYFPHYGKYEEYDEAQNAITLSDLQVVNWMLSQFATIDEVREAIEGVKVVSLDKPGKSSTVHWRIGDAKGNQMVLEFVGGVPYFYENKVGVLTNSPDFPWQVINLNNYVNLYPGAVTPQQWGGVTIFPFGAGAGFHGIPGDVTPPSRFVRVAFYKATAPVCPTAYDAILQSFHILNNFDIPIGIEYALGKAPDIPSATQWTSAIDLTNRKVYYKTAYNNNIRCISMKKIDFDKVKYQSYPLDKELKQPVEEIIVK

SEQ ID NO: 96 - DNA, 954 bp, Bifidobacterium longum
atgtgcactggtgtccgtttctccgatgatgagggcaacacctatttcggccgtaatctcgactggagtttctcatatggggagaccatcctggttactccgcgcggctaccactatgacacggtgtttggtgcgggcggcaaggcgaagccgaacgcggtgatcggcgtgggtgtggtcatggccgataggccgatgtatttcgactgcgccaatgaacatggtctggccatcgccggcttgaatttccccggctacgcctcgttcgtccacgaaccggtcgaaggcacggaaaacgtcgccacgttcgaatttccgctgtgggtggcgcgtaatttcgactccgtcgacgaggtcgaggaggcgctcaggaacgtgacgctcgtctcccagatcgtgccgggacagcaggagtctctgctgcactggttcatcggcgacggcaagcgcagcatcgtcgtcgagcagatggccgatggcatgcacgtgcatcatgatgacgtcgatgtgctgaccaatcagccgacgttcgacttccatatggaaaacctgcgcaactacatgtgcgtcagcaacgagatggccgaaccgacttcatggggcaaggcctccttgaccgcctggggtgcgggtgtgggcatgcatggcatcccgggcgacgtgagttccccgtcgcgcttcgttcgtgtggcctacaccaacgcgcattacccgcagcagaacgatgaagccgccaatgtgtcgcgcctgttccacaccctcggctccgtgcagatggtggacggcatggcgaagatgggcgacggccagttcgaacgcacgctgttcaccagcggatattcgtccaagaccaacacctattacatgaacacctatgatgaccccgccatccgttcctacgccatggccgattacgatatggattcctcggagctcatcagcgtcgcccgatga

SEQ ID NO: 97 - protein, 317 aa, Bifidobacterium longum
MCTGVRFSDDEGNTYFGRNLDWSFSYGETILVTPRGYHYDTVFGAGGKAKPNAVIGVGVVMADRPMYFDCANEHGLAIAGLNFPGYASFVHEPVEGTENVATFEFPLWVARNFDSVDEVEEALRNVTLVSQIVPGQQESLLHWFIGDGKRSIVVEQMADGMHVHHDDVDVLTNQPTFDFHMENLRNYMCVSNEMAEPTSWGKASLTAWGAGVGMHGIPGDVSSPSRFVRVAYTNAHYPQQNDEAANVSRLFHTLGSVQMVDGMAKMGDGQFERTLFTSGYSSKTNTYYMNTYDDPAIRSYAMADYDMDSSELISVAR

SEQ ID NO: 98 - DNA, 978 bp, Listeria monocytogenes
atgtgtacgtcaataacttatacaacgaaggatcactattttggaaggaatttcgattatgaactttcttacaaagaagttgtggttgttacgccgaaaaattacccgttccattttcgcaaggtagaggatatagagaagcattatgcacttattggtattgctgctgtgatggaaaactacccgttgtattacgatgctaccaatgaaaaaggccttagtatggcaggactcaatttctcaggaaatgcggattacaaggattttgcagaaggtaaggacaatgtgaccccctttgaatttattccgtggattcttggtcaatgcgctactgtaaaagaagcaagaagattacttcagagaatcaatctcgtgaatattagttttagtgaaaatttaccgctgtctccattacattggttgatggctgatcaaacagaatctattgtagtggaatgtgtgaaagatggacttcacatttatgataatcctgttggcgtgttaacaaataatccaacatttgattaccaactatttaatttaaacaattatcgcgttctttcgagtgaaaccccagaaaataatttttccaaagagattgatttggatgcttatagtcgtgggatgggcggaattggcttacctggtgatttatcttctatgtctcgttttgtgaaagcaacttttaccaaattgaattctgtttcaggtgattctgaatcagaaagtattagccaatttttccatattttaggctcggtggaacaacaaaaaggtctttgtgatgttggtgggggaaaatacgagcatactatttattcctcgtgttgcaatatcgataaaggaatttattattatagaacatacggaaacagtcaaattactggtgtggatatgcaccaagaggatttagagagcaaagaactagctatttatccactcgtcaatgagcaacgactaaacattgttaacaaataa

SEQ ID NO: 99 - protein, 325 aa, Listeria monocytogenes
MCTSITYTTKDHYFGRNFDYELSYKEVVVVTPKNYPFHFRKVEDIEKHYALIGIAAVMENYPLYYDATNEKGLSMAGLNFSGNADYKDFAEGKDNVTPFEFIPWILGQCATVKEARRLLQRINLVNISFSENLPLSPLHWLMADQTESIVVECVKDGLHIYDNPVGVLTNNPTFDYQLFNLNNYRVLSSETPENNFSKEIDLDAYSRGMGGIGLPGDLSSMSRFVKATFTKLNSVSGDSESESISQFFHILGSVEQQKGLCDVGGGKYEHTIYSSCCNIDKGIYYYRTYGNSQITGVDMHQEDLESKELAIYPLVNEQRLNIVNK

SEQ ID NO: 100 - DNA, 990 bp, Clostridium perfringens
atgtgtacaggattagccttagaaacaaaagatggattacatttgtttggaagaaatatggatattgaatattcatttaatcaatctattatatttattcctaggaattttaaatgtgtaaacaaatcaaacaaaaaagaattaacaacaaaatatgctgttcttggaatgggaactatttttgatgattatcctacctttgcagatggtatgaatgaaaagggattagggtgtgctggcttaaatttccctgtttatgttagctattctaaagaagatatagaaggtaaaactaatattccagtatataatttcttattatgggttttagctaattttagctcagtagaagaggtaaaggaagcattaaaaaatgctaatatagtggatatacctattagcgaaaatattcctaatacaactcttcattggatgataagcgatataacaggaaagtctattgtggttgaacaaacaaaggaaaaattaaatgtatttgataataatattggagtattaactaattcacctacttttgattggcatgtagcaaatttaaatcaatatgtaggtttgagatataatcaagttccagaatttaagttaggagatcaatctttaactgctttaggtcaaggaactggtttagtaggattaccaggggactttacacctgcatctagatttataagagtagcatttttaagagatgcaatgataaaaaatgataaagattcaatagacttaattgaatttttccatatattaaataatgttgctatggtaagaggatcaactagaactgtagaagaaaaaagtgatcttactcaatatacaagttgcatgtgtttagaaaaaggaatttattattataatacctatgaaaataatcaaattaatgcaatagacatgaataaagaaaacttagatggaaatgaaattaaaacatataaatacaacaaaactttaagtattaatcatgtaaattag

SEQ ID NO: 101 - protein, 329 aa, Clostridium perfringens
MCTGLALETKDGLHLFGRNMDIEYSFNQSIIFIPRNFKCVNKSNKKELTTKYAVLGMGTIFDDYPTFADGMNEKGLGCAGLNFPVYVSYSKEDIEGKTNIPVYNFLLWVLANFSSVEEVKEALKNANIVDIPISENIPNTTLHWMISDITGKSIVVEQTKEKLNVFDNNIGVLTNSPTFDWHVANLNQYVGLRYNQVPEFKLGDQSLTALGQGTGLVGLPGDFTPASRFIRVAFLRDAMIKNDKDSIDLIEFFHILNNVAMVRGSTRTVEEKSDLTQYTSCMCLEKGIYYYNTYENNQINAIDMNKENLDGNEIKTYKYNKTLSINHVN

SEQ ID NO: 102 - DNA, 975 bp, Enterococcus faecium
atgtgtacgtctattacttatgtaacaagtgatcattattttggaaggaattttgattatgaaatatcttacaatgaagtagttactgttactccaagaaattataagttgaattttcgaaaggtaaatgatttggatactcattatgcaatgattggtattgccgctggtatagctgactaccctctttattacgatgcgacaaatgaaaaaggattgagtatggctgggctaaatttttctgggtatgctgattataaagaaatacaagaagggaaagacaatgtatctccttttgaatttattccttggattttaggacaatgctcaacagtaggagaagctaaaaaattgttaaaaaatatcaatttagcaaatataaattatagtgacgaacttcctttatcccctttacattggctattagctgataaagaaaaatcaattgtcattgaaagtatgaaagatggacttcatatatatgataaccctgtgggcgttcttaccaataatccttcatttgactatcaattatttaatttaaacaattatcgtgtcttatcgagtgaaactcctaaaaataatttttcaaatcaaataagtttgaatgcctatagccgcggtatgggagggataggcttgcctggagatttatcctcagtatctcgttttgttaaagcgacttttacgaagctgaattctgtatctggagattcagagtcagaaagtattagtcaatttttccatatcttaggttcagtagaacaacaaaaaggtttgtgtgatgtaggtgatggaaaatatgaatatacaatttattcttcttgttgcaatgttgacaaaggaatctattattatcgaacatatgaagacagtcaaattactgcaattgatatgaataaagaagacttagatagtcataagttaattagttatccaattatagaaaaacaacaaattaaatatataaattag

SEQ ID NO: 103 - protein, 324 aa, Enterococcus faecium
MCTSITYVTSDHYFGRNFDYEISYNEVVTVTPRNYKLNFRKVNDLDTHYAMIGIAAGIADYPLYYDATNEKGLSMAGLNFSGYADYKEIQEGKDNVSPFEFIPWILGQCSTVGEAKKLLKNINLANINYSDELPLSPLHWLLADKEKSIVIESMKDGLHIYDNPVGVLTNNPSFDYQLFNLNNYRVLSSETPKNNFSNQISLNAYSRGMGGIGLPGDLSSVSRFVKATFTKLNSVSGDSESESISQFFHILGSVEQQKGLCDVGDGKYEYTIYSSCCNVDKGIYYYRTYEDSQITAIDMNKEDLDSHKLISYPIIEKQQIKYIN

SEQ ID NO: 104 - DNA, 989 bp, Lacotbacillus acidophilus
aagagaaaaatatgtgtacatcaattatattcagtcccaaagatcattactttggtcgtaaccttgatttagaaattacttttggtcaacaagttgttattacgccacgcaattacacttttaaattccgtaagatgcccagtttaaaaaagcactatgcaatgattggtatctcattagatatggatgattatcccctatatttcgacgctacaaatgaaaaaggtttaggtatggccggactcaactatccaggaaatgctacatattatgaagaaaaagaaaataaagataatattgcttcctttgaattcatcccttggattttaggacagtgtagcactattagcgaagtaaaggatttacttagcagaatcaacatcgccgatttaaatttcagcgaaaaaatgcaagcctcctctcttcactggcttattgcagataaaacaggtacatcattagttgttgaaacagacaaagatggaatgcatatttatgataatccagttggctgcttaactaataatccacaatttccaaagcaattattcaatttaaataactatgctgacgtatctccaaaaatgcctaaaaataacttctcagataaagtaaatatggctggctacagccgtggattagggtctcacaacttaccaggtggaatggattctgaatcacgttttgtcagagtagctttcaataaatttaatgctccaattgctgaaaccgaagaagaaaatattgatacttacttccacattttacattcggttgaacaacaaaagggactggatgaagttggtccaaactcatttgaatatacaatttattctgatggaactaacttagacaaaggtattttctactacaccacttattcaaacaaacaaattaacgttgttgatatgaataaagaagatctagatagcagcaatttgatcacttatgatatgcttgataaaactaaatttaaccatcaaaactaa

SEQ ID NO: 105 - protein, 325 aa, Lacotbacillus acidophilus
MCTSIIFSPKDHYFGRNLDLEITFGQQVVITPRNYTFKFRKMPSLKKHYAMIGISLDMDDYPLYFDATNEKGLGMAGLNYPGNATYYEEKENKDNIASFEFIPWILGQCSTISEVKDLLSRINIADLNFSEKMQASSLHWLIADKTGTSLVVETDKDGMHIYDNPVGCLTNNPQFPKQLFNLNNYADVSPKMPKNNFSDKVNMAGYSRGLGSHNLPGGMDSESRFVRVAFNKFNAPIAETEEENIDTYFHILHSVEQQKGLDEVGPNSFEYTIYSDGTNLDKGIFYYTTYSNKQINVVDMNKEDLDSSNLITYDMLDKTKFNHQN

SEQ ID NO: 106 - DNA, 994 bp, Lacotbacillus acidophilus
agaaagcgtgcagtaaatgtgtacatcaatttgttataatcctaacgatcattattttggtagaaatcttgactatgaaattgcttatggtcaaaaagtagtcattgtaccaagaaactacgaatttaagtatagagaaatgccctctcaaaagatgcattatgcttttatcggagtatctgtagttaatgatgattatccattattatgtgatgcaattaatgaaaaggggcttggtattgcaggattaaattttcaaggtcctaatcattactttcctaaaatcgaaggtaagaagaatattgcttcttttgaattaatgccatacttattaagtaattgtgaaaatactgacgatgttaaagaaatcttagataatgcaaatattttaaatattagcttttcagcaaattatcctgcagctgatttacattggattttaagtgataaagctggtaagagtatcgtagttgaatcaaccaattcaggtttacatatttatgataatccagtgaatgtcttaactaacaatcctgaatttccggatcaattaattaaattaagtgactacgccgacgttactccacataatcctaagaatacattggttcctaatgttgatcttaatctatatagtagaggcttaggtactcaccacttacctggtggaatggattctagctctcgatttgttaaggtagcttttgtcttggcacacactccacaaggaaaaaatgaagtggaaaatgttactaattatttccatattctgcattcagtagaacaacctgatggtttagatgaagtagaagataatcgctatgaatatactatgtatacagattgtatgaacttagataaaggtattttgtactttactacttatgacaataatcggattaatgcagtagatatgcataaagcagatttagattcagaagatttaatctgctacgatttgtttaagaaacaagatattgaatatatgaattaa

SEQ ID NO: 107 - protein, 325 aa, Lacotbacillus acidophilus
MCTSICYNPNDHYFGRNLDYEIAYGQKVVIVPRNYEFKYREMPSQKMHYAFIGVSVVNDDYPLLCDAINEKGLGIAGLNFQGPNHYFPKIEGKKNIASFELMPYLLSNCENTDDVKEILDNANILNISFSANYPAADLHWILSDKAGKSIVVESTNSGLHIYDNPVNVLTNNPEFPDQLIKLSDYADVTPHNPKNTLVPNVDLNLYSRGLGTHHLPGGMDSSSRFVKVAFVLAHTPQGKNEVENVTNYFHILHSVEQPDGLDEVEDNRYEYTMYTDCMNLDKGILYFTTYDNNRINAVDMHKADLDSEDLICYDLFKKQDIEYMN

SEQ ID NO: 108 - DNA, 1104 bp, Brucella abortus
atggaaacgaaaagctctctctggaaatcatcgcgccgcgtgcttgcacatggggctgcaactgttctggtcgcggcgggccttatcgttccccaggcggctatggcttgcacgagcttcgttctgccgacgagcgacggtggtatggtctatggtcgcacgatggaattcgggttcaatctcaaatccgacatgattgccattccgcgcaattacaccatcacggcaagcgggccggacggtgctgcgggcaagaaatggaagggcaaatatgccacgatcggcatgaatgcttttggtatcgtcgctctcaccgacggtatgaacgagaaggggcttgcaggcgggcttctctatttcccggaatatgccaagtatcaggacccatccacggcgaagccggaagacagcctcgctccgtgggatttcctgacctgggcgctggccaatttttcgacagtggccgaagtcaaggatgctttgagcaccatttccatcgtcgatgtgaaacaaaaggacctgggatttaccccgcccgctcactacacgctgcatgatgcgaccggcgcatccatcgtgatcgaaccgatcgacggcaagctcaaggtttacgacaacaagctcggtgtcatgaccaattcgccgtctttcgactggcacatgaccaatctgcgcaactatgtctatctctcgcgtgaaaatccgaagccgttgcagatccttggcgagacgatccagtcattcgggcaaggcgccggtatgcatggtattccgggcgacaccacgccgccatcgcgtttcgtgcgtgcaagcgcctacgtcctttccgccaagaaggtgccgagcggccttgaaagcgtgcggctggccgagcatattgccaataacttcgacattccaaagggatggagcgaagagcagaatatgtttgaatatacccagtggaccgcctttgcggacatgaagaacgatgtctattacatcaagacctatgacgatcaggttctgcgcagcttcagcttcaaggattttgatgtcgatagcaaagatattctaacgatcaagttcgagccaaaactggacgcgccgtcactgaaaaagtaa

SEQ ID NO: 109 - protein, 367 aa, Brucella abortus
METKSSLWKSSRRVLAHGAATVLVAAGLIVPQAAMACTSFVLPTSDGGMVYGRTMEFGFNLKSDMIAIPRNYTITASGPDGAAGKKWKGKYATIGMNAFGIVALTDGMNEKGLAGGLLYFPEYAKYQDPSTAKPEDSLAPWDFLTWALANFSTVAEVKDALSTISIVDVKQKDLGFTPPAHYTLHDATGASIVIEPIDGKLKVYDNKLGVMTNSPSFDWHMTNLRNYVYLSRENPKPLQILGETIQSFGQGAGMHGIPGDTTPPSRFVRASAYVLSAKKVPSGLESVRLAEHIANNFDIPKGWSEEQNMFEYTQWTAFADMKNDVYYIKTYDDQVLRSFSFKDFDVDSKDILTIKFEPKLDAPSLKK

SEQ ID NO: 110 - DNA, 1323 bp, Lactobacillus johnsonii
atgtcgaccacaccgacacagccatcatcacgaaaacaggctgtttacccgtacttgatcgtgctgtcgggcatcgtcttcacggccatcccggtatcgctggtctgcagttgcgcaggtatcttcttcacgcctgtcagcagctacttccatgttcccaaggccgcattcaccggatatttcagcatattcagcatcaccatggtcgccttcctgccggtggccggatggctgatgcaccgctacgatctgcgcatcgtactgaccgcaagcaccgtcctggctggactgggctgcctgggtatgtcccgatcatccgccatgtggcagttctatctatgcggagtggttctgggaatcggcatgccggccgtcctctatctgtcagtgccaacactcatcaacgcctggttccgcaagcgggtcgggttcttcatcggcctgtgcatggccttcaccggcataggcggcgtgatcttcaaccagataggcaccatgatcatcagatccgcccctgatggatggaggcggggatatctggttttcgctattctcatcctggtgatcaccctgcccttcaccattttcgtcattcgcagcacacccgaacagatgggtctgcatccctacggcgccgaccaggagcctgatgcagctgagacggccaccaatagtgcaggcaccgggagcaaagaccaaaagagtcctgagcctgcagcgtcaaccgtaggcatgactgcctcccaggccttgcgctcccctgccttctgggcgctggcgctcttctgcggtctgatcaccatgaatcagaccatttaccagttcctgccctcctacgcggcatccctgccatccatggcagcctacacgggactgatcgcctcctcctgcatggccggccaggccatcggcaagatcatcctgggcatggtcaacgacggcagcatcgtaggcggtctctgtctgggcatcggcggcggcattctcggcgtctgcctcatggtcgccttccccggattgcccgtgctcctcctgctgggagcctttgccttcggccttgtctacgcctgcactactgtgcagacaccaatcctggttacagcggtcttcggctcgcgcgactacaccaacatctatgcacgtatccagatggttgggtccctagcctcggccttcgcagctctcttctggggcgccatcgctgaccagccccacggctacatcatcatgttcggtctgagcatcctgatcatggttgtggccttgttcctaggcattatccctctgaaaggtacgcgcaagttgaccgatcagatcgcctga

SEQ ID NO: 111 - protein, 440 aa, Lactobacillus johnsonii
MSTTPTQPSSRKQAVYPYLIVLSGIVFTAIPVSLVCSCAGIFFTPVSSYFHVPKAAFTGYFSIFSITMVAFLPVAGWLMHRYDLRIVLTASTVLAGLGCLGMSRSSAMWQFYLCGVVLGIGMPAVLYLSVPTLINAWFRKRVGFFIGLCMAFTGIGGVIFNQIGTMIIRSAPDGWRRGYLVFAILILVITLPFTIFVIRSTPEQMGLHPYGADQEPDAAETATNSAGTGSKDQKSPEPAASTVGMTASQALRSPAFWALALFCGLITMNQTIYQFLPSYAASLPSMAAYTGLIASSCMAGQAIGKIILGMVNDGSIVGGLCLGIGGGILGVCLMVAFPGLPVLLLLGAFAFGLVYACTTVQTPILVTAVFGSRDYTNIYARIQMVGSLASAFAALFWGAIADQPHGYIIMFGLSILIMVVALFLGIIPLKGTRKLTDQIA

SEQ ID NO: 112 - DNA, 1356 bp, Lactobacillus johnsonii
atgtctactgatgccgctactaaagataaagtagtaagcaagggctataaatacttcatggttttcctttgtatgttaacccaagctattccttatggaattgctcaaaacattcagcctttgtttatccaccctttagttaatactttccactttaccttagcatcgtacacattaatttttacgtttggtgcggtttttgcttcagttgcttctccatttattggtaaggcattagaaaaagttaacttccgactaatgtatttaattggtattggtctttctgctattgcctacgtaatttttggaattagtacaaaactacccggtttctatattgccgctatcatttgtatggttggttcaaccttttactccggccaaggtgttccctgggttattaaccactggttcccagcaaagggacgtggggctgccttaggaattgccttctgcggtggttctattggtaatatctttttacaaccagcaacccaagctattttaaaacactacatgacaggtaatactaagaccggtcatttaacctctatggcaccattctttatctttgccgtagctttattagtaatcggtgtaattatcgcctgcttcattagaacccctaagaaagacgaaattgttgtttctgatgcagaactagctgaaagcaagaaagctgaagccgcagccaaagctaaagagtttaaaggctggactagtaaacaagtgttacaaatgaaatggttctggattttcagccttggtttcttaatcattggtttaggcttagcttctttaaatgaagactatgccgccttccttgatactaagctttctttaaccgatgttggtttagttgggtcaatgtacggtgttggttgtttaatcggaaatatttctggtggtttcttatttgataaatttggtacagcaaaatcaatgacctatgctggttgtatgtatattttatctattctgatgatgatctttattagcttccagccatatggttcatctattagtaaggctgctggcattggctatgctatcttttgcggcttagctgtatttagttacatgtcaggcccagccttcatggcaaaagacctctttggttcaagagatcaaggtgtcatgcttggatacgttggtttagcttatgcaattggctatgccattggtgctccactatttgggattattaagggagcggcaagctttacagttgcttggtactttatgattgcctttgttgcaattggttttatcattttagtatttgccgttatccaaattaagagataccaaaagaaatacattgcagagcaagcagcaaaagctaatgctaaataa

SEQ ID NO: 113 - protein, 451 aa, Lactobacillus johnsonii
MSTDAATKDKVVSKGYKYFMVFLCMLTQAIPYGIAQNIQPLFIHPLVNTFHFTLASYTLIFTFGAVFASVASPFIGKALEKVNFRLMYLIGIGLSAIAYVIFGISTKLPGFYIAAIICMVGSTFYSGQGVPWVINHWFPAKGRGAALGIAFCGGSIGNIFLQPATQAILKHYMTGNTKTGHLTSMAPFFIFAVALLVIGVIIACFIRTPKKDEIVVSDAELAESKKAEAAAKAKEFKGWTSKQVLQMKWFWIFSLGFLIIGLGLASLNEDYAAFLDTKLSLTDVGLVGSMYGVGCLIGNISGGFLFDKFGTAKSMTYAGCMYILSILMMIFISFQPYGSSISKAAGIGYAIFCGLAVFSYMSGPAFMAKDLFGSRDQGVMLGYVGLAYAIGYAIGAPLFGIIKGAASFTVAWYFMIAFVAIGFIILVFAVIQIKRYQKKYIAEQAAKANAK

SEQ ID NO: 114 - DNA, 4775 bp, Homo sapiens
gaatgatgaaaaccgaggttggaaaaggttgtgaaaccttttaactctccacagtggagtccattatttcctctggcttcctcaaattcatattcacagggtcgttggctgtgggttgcaattaccatgtctgactcagtaattcttcgaagtataaagaaatttggagaggagaatgatggttttgagtcagataaatcatataataatgataagaaatcaaggttacaagatgagaagaaaggtgatggcgttagagttggcttctttcaattgtttcggttttcttcatcaactgacatttggctgatgtttgtgggaagtttgtgtgcatttctccatggaatagcccagccaggcgtgctactcatttttggcacaatgacagatgtttttattgactacgacgttgagttacaagaactccagattccaggaaaagcatgtgtgaataacaccattgtatggactaacagttccctcaaccagaacatgacaaatggaacacgttgtgggttgctgaacatcgagagcgaaatgatcaaatttgccagttactatgctggaattgctgtcgcagtacttatcacaggatatattcaaatatgcttttgggtcattgccgcagctcgtcagatacagaaaatgagaaaattttactttaggagaataatgagaatggaaatagggtggtttgactgcaattcagtgggggagctgaatacaagattctctgatgatattaataaaatcaatgatgccatagctgaccaaatggcccttttcattcagcgcatgacctcgaccatctgtggtttcctgttgggatttttcaggggttggaaactgaccttggttattatttctgtcagccctctcattgggattggagcagccaccattggtctgagtgtgtccaagtttacggactatgagctgaaggcctatgccaaagcaggggtggtggctgatgaagtcatttcatcaatgagaacagtggctgcttttggtggtgagaaaagagaggttgaaaggtatgagaaaaatcttgtgttcgcccagcgttggggaattagaaaaggaatagtgatgggattctttactggattcgtgtggtgtctcatctttttgtgttatgcactggccttctggtacggctccacacttgtcctggatgaaggagaatatacaccaggaacccttgtccagattttcctcagtgtcatagtaggagctttaaatcttggcaatgcctctccttgtttggaagcctttgcaactggacgtgcagcagccaccagcatttttgagacaatagacaggaaacccatcattgactgcatgtcagaagatggttacaagttggatcgaatcaagggtgaaattgaattccataatgtgaccttccattatccttccagaccagaggtgaagattctaaatgacctcaacatggtcattaaaccaggggaaatgacagctctggtaggacccagtggagctggaaaaagtacagcactgcaactcattcagcgattctatgacccctgtgaaggaatggtgaccgtggatggccatgacattcgctctcttaacattcagtggcttagagatcagattgggatagtggagcaagagccagttctgttctctaccaccattgcagaaaatattcgctatggcagagaagatgcaacaatggaagacatagtccaagctgccaaggaggccaatgcctacaacttcatcatggacctgccacagcaatttgacacccttgttggagaaggaggaggccagatgagtggtggccagaaacaaagggtagctatcgccagagccctcatccgaaatcccaagattctgcttttggacatggccacctcagctctggacaatgagagtgaagccatggtgcaagaagtgctgagtaagattcagcatgggcacacaatcatttcagttgctcatcgcttgtctacggtcagagctgcagataccatcattggttttgaacatggcactgcagtggaaagagggacccatgaagaattactggaaaggaaaggtgtttacttcactctagtgactttgcaaagccagggaaatcaagctcttaatgaagaggacataaaggatgcaactgaagatgacatgcttgcgaggacctttagcagagggagctaccaggatagtttaagggcttccatccggcaacgctccaagtctcagctttcttacctggtgcacgaacctccattagctgttgtagatcataagtctacctatgaagaagatagaaaggacaaggacattcctgtgcaggaagaagttgaacctgccccagttaggaggattctgaaattcagtgctccagaatggccctacatgctggtagggtctgtgggtgcagctgtgaacgggacagtcacacccttgtatgcctttttattcagccagattcttgggactttttcaattcctgataaagaggaacaaaggtcacagatcaatggtgtgtgcctactttttgtagcaatgggctgtgtatctcttttcacccaatttctacagggatatgcctttgctaaatctggggagctcctaacaaaaaggctacgtaaatttggtttcagggcaatgctggggcaagatattgcctggtttgatgacctcagaaatagccctggagcattgacaacaagacttgctacagatgcttcccaagttcaaggggctgccggctctcagatcgggatgatagtcaattccttcactaacgtcactgtggccatgatcattgccttctcctttagctggaagctgagcctggtcatcttgtgcttcttccccttcttggctttatcaggagccacacagaccaggatgttgacaggatttgcctctcgagataagcaggccctggagatggtgggacagattacaaatgaagccctcagtaacatccgcactgttgctggaattggaaaggagaggcggttcattgaagcacttgagactgagctggagaagcccttcaagacagccattcagaaagccaatatttacggattctgctttgcctttgcccagtgcatcatgtttattgcgaattctgcttcctacagatatggaggttacttaatctccaatgaggggctccatttcagctatgtgttcagggtgatctctgcagttgtactgagtgcaacagctcttggaagagccttctcttacaccccaagttatgcaaaagctaaaatatcagctgcacgcttttttcaactgctggaccgacaacccccaatcagtgtatacaatactgcaggtgaaaaatgggacaacttccaggggaagattgattttgttgattgtaaatttacatatccttctcgacctgactcgcaagttctgaatggtctctcagtgtcgattagtccagggcagacactggcgtttgttgggagcagtggatgtggcaaaagcactagcattcagctgttggaacgtttctatgatcctgatcaagggaaggtgatgatagatggtcatgacagcaaaaaagtaaatgtccagttcctccgctcaaacattggaattgtttcccaggaaccagtgttgtttgcctgtagcataatggacaatatcaagtatggagacaacaccaaagaaattcccatggaaagagtcatagcagctgcaaaacaggctcagctgcatgattttgtcatgtcactcccagagaaatatgaaactaacgttgggtcccaggggtctcaactctctagaggggagaaacaacgcattgctattgctcgggccattgtacgagatcctaaaatcttgctactagatgaagccacttctgccttagacacagaaagtgaaaagacggtgcaggttgctctagacaaagccagagagggtcggacctgcattgtcattgcccatcgcttgtccaccatccagaacgcggatatcattgctgtcatggcacagggggtggtgattgaaaaggggacccatgaagaactgatggcccaaaaaggagcctactacaaactagtcaccactggatcccccatcagttgacccaatgcaagaatctcagacacacatgacgcaccagttacaggggttgtttttaaagaaaaaaacaatcccagcaggagggattgctgggattgttttttctttaaagaagaatgttaatattttacttttacagtcattttcctacatcggaatccaagctaatttctaatggccttccataataattctgctttagatgtgtatacagaaaatgaaagaaactagggtccatatgagggaaaacccaatgtcaagtggcagctcagccaccactcagtgcttctctgtgcaggagccagtcctgattaatatgtgggaattagtgagacatcagggagtaagtgacactttgaactcctcaagggcagagaactgtctttcatttttgaaccctcggtgtacacagaggcgggtctataacaggcaatcaacaaacgtttcttgagctagaccaaggtcagatttgaaaagaacagaaggactgaagaccagctgtgtttcttaactaaatttgtctttcaagtgaaaccagcttccttcatctctaaggctaaggatagggaaagggtggatgctctcaggctgagggaggcagaaagggaaagtattagcatgagctttccagttagggctgttgatttatgctttaacttcagagtgagtgtaggggtggtgatgct

SEQ ID NO: 115 - protein, 1321 aa, Homo sapiens
MSDSVILRSIKKFGEENDGFESDKSYNNDKKSRLQDEKKGDGVRVGFFQLFRFSSSTDIWLMFVGSLCAFLHGIAQPGVLLIFGTMTDVFIDYDVELQELQIPGKACVNNTIVWTNSSLNQNMTNGTRCGLLNIESEMIKFASYYAGIAVAVLITGYIQICFWVIAAARQIQKMRKFYFRRIMRMEIGWFDCNSVGELNTRFSDDINKINDAIADQMALFIQRMTSTICGFLLGFFRGWKLTLVIISVSPLIGIGAATIGLSVSKFTDYELKAYAKAGVVADEVISSMRTVAAFGGEKREVERYEKNLVFAQRWGIRKGIVMGFFTGFVWCLIFLCYALAFWYGSTLVLDEGEYTPGTLVQIFLSVIVGALNLGNASPCLEAFATGRAAATSIFETIDRKPIIDCMSEDGYKLDRIKGEIEFHNVTFHYPSRPEVKILNDLNMVIKPGEMTALVGPSGAGKSTALQLIQRFYDPCEGMVTVDGHDIRSLNIQWLRDQIGIVEQEPVLFSTTIAENIRYGREDATMEDIVQAAKEANAYNFIMDLPQQFDTLVGEGGGQMSGGQKQRVAIARALIRNPKILLLDMATSALDNESEAMVQEVLSKIQHGHTIISVAHRLSTVRAADTIIGFEHGTAVERGTHEELLERKGVYFTLVTLQSQGNQALNEEDIKDATEDDMLARTFSRGSYQDSLRASIRQRSKSQLSYLVHEPPLAVVDHKSTYEEDRKDKDIPVQEEVEPAPVRRILKFSAPEWPYMLVGSVGAAVNGTVTPLYAFLFSQILGTFSIPDKEEQRSQINGVCLLFVAMGCVSLFTQFLQGYAFAKSGELLTKRLRKFGFRAMLGQDIAWFDDLRNSPGALTTRLATDASQVQGAAGSQIGMIVNSFTNVTVAMIIAFSFSWKLSLVILCFFPFLALSGATQTRMLTGFASRDKQALEMVGQITNEALSNIRTVAGIGKERRFIEALETELEKPFKTAIQKANIYGFCFAFAQCIMFIANSASYRYGGYLISNEGLHFSYVFRVISAVVLSATALGRAFSYTPSYAKAKISAARFFQLLDRQPPISVYNTAGEKWDNFQGKIDFVDCKFTYPSRPDSQVLNGLSVSISPGQTLAFVGSSGCGKSTSIQLLERFYDPDQGKVMIDGHDSKKVNVQFLRSNIGIVSQEPVLFACSIMDNIKYGDNTKEIPMERVIAAAKQAQLHDFVMSLPEKYETNVGSQGSQLSRGEKQRIAIARAIVRDPKILLLDEATSALDTESEKTVQVALDKAREGRTCIVIAHRLSTIQNADIIAVMAQGVVIEKGTHEELMAQKGAYYKLVTTGSPIS

SEQ ID NO: 116 - protein, 57 aa, Streptococcus thermophilus
MEGRTVFVIAHRLSTIVNSDVILVMDHGRIIKRGDHDTLMEQGGTYYRLYTGSLEID

SEQ ID NO: 117 - DNA, 150 bp, Nostoc spp. Asl1293
atgtgggggaaacaaagacaaagaatcgccattgcacgagggggttttaagaatttgcaggttttgattttagataaagcaacctcggcattggataataaaacagaagcagctattgagcgatcgctggtgttgactgttgaccaatga

SEQ ID NO: 118 - protein, 49 aa, Nostoc spp. Asl1293
MWGKQRQRIAIARGGFKNLQVLILDKATSALDNKTEAAIERSLVLTVDQ

SEQ ID NO: 119 - DNA, 948 bp, Neisseria meningitides (MC58)
atgaatatcctcagtaaaatcagcagctttatcggaaaaacattttccctctgggccgcgctctttgccgccgccgcttttttcgcgcccgacaccttcaaatgggcggggccttatattccttggctgttgggcattattatgttcggtatgggtttgacgctcaaaccttccgacttcgatattttgttcaaacatcccaaagtcgtcatcatcggcgtaatcgcacaattcgccattatgccggcaaccgcctggctgctgtccaaactgttgaacctgcctgccgaaatcgcggtcggcgtgattttggtcggctgctgcccgggcggtacggcttccaatgtgatgacctatctggcgcgtggcaatgtggctttgtcggttgccgttacgtctgtttccaccctgatttccccattgctgactcccgccatcttcctgatgcttgccggcgaaatgctggaaatccaagcggccggtatgttgatgtccatcgtcaaaatggttttgctccccattgttttgggtttgattgtccataaggttttgggcagtaaaaccgaaaagctgaccgatgcgctgccgctggtttccgttgccgccatcgtgctgattatcggcgcggttgttggggcaagcaaaggcaagattatggaaagcggcctgctgatttttgcggttgtcgtactccacaacggcatcggctacctgctcggcttctttgccgccaaatggaccggcctgccttatgatgcacaaaaaacgctgaccatcgaagtcggtatgcaaaactcgggcctggccgccgcgcttgccgccgcacactttgccgccgcgccggtcgttgccgttccgggcgcattgttcagcgtgtggcacaatatctccggctcgctgctggcaacttattgggcggccaaagccggtaaacataaaaaaccctaa

SEQ ID NO: 120 - protein, 323 aa, Neisseria meningitides (MC58)
MNILSKISSFIGKTFSLWAALFAAAAFFAPDTFKWAGPYIPWLLGIIMFGMGLTLKPSDFDILFKHPKVVIIGVIAQFAIMPATAWLLSKLLNLPAEIAVGVILVGCCPGGTASNVMTYLARGNVALSVAVTSVSTLISPLLTPAIFLMLAGEMLEIQAAGMLMSIVKMVLLPIVLGLIVHKVLGSKTEKLTDALPLVSVAAIVLIIGAVVGASKGKIMESGLLIFAVVVLHNGIGYLLGFFAAKWTGLPYDAQKTLTIEVGMQNSGLAAALAAAHFAAAPVVAVPGALFSVWHNISGSLLATYWAAKAGKHKKPGSENLYFQ

SEQ ID NO: 121 - protein, 33 aa, Artificial Sequence
  Synthetic
HADGSFSDEMNTILDNLAARDFINWLIQTKITD

SEQ ID NO: 122 - protein, 33 aa, Artificial Sequence
  Synthetic
HGDGSFSDEMNTILDNLAARDFINWLIQTKITD

SEQ ID NO: 123 - DNA, 7584 bp, Artificial Sequence
  Synthetic
taagacccactttcacatttaagttgtttttctaatccgcatatgatcaattcaaggccgaataagaaggctggctctgcaccttggtgatcaaataattcgatagcttgtcgtaataatggcggcatactatcagtagtaggtgtttccctttcttctttagcgacttgatgctcttgatcttccaatacgcaacctaaagtaaaatgccccacagcgctgagtgcatataatgcattctctagtgaaaaaccttgttggcataaaaaggctaattgattttcgagagtttcatactgtttttctgtaggccgtgtacctaaatgtacttttgctccatcgcgatgacttagtaaagcacatctaaaacttttagcgttattacgtaaaaaatcttgccagctttccccttctaaagggcaaaagtgagtatggtgcctatctaacatctcaatggctaaggcgtcgagcaaagcccgcttattttttacatgccaatacaatgtaggctgctctacacctagcttctgggcgagtttacgggttgttaaaccttcgattccgacctcattaagcagctctaatgcgctgttaatcactttacttttatctaatctagacatcattaattcctaatttttgttgacactctatcattgatagagttattttaccactccctatcagtgatagagaaaagtgaactctagaaataattttgtttaactttaagaaggagatatacatatgcaaacacaaaaaccgactctcgaactgctaacctgcgaaggcgcttatcgcgacaacccgactgcgctttttcaccagttgtgtggggatcgtccggcaacgctgctgctggaatccgcagatatcgacagcaaagatgatttaaaaagcctgctgctggtagacagtgcgctgcgcattacagcattaagtgacactgtcacaatccaggcgctttccggcaatggagaagccctgttgacactactggataacgccttgcctgcgggtgtggaaaatgaacaatcaccaaactgccgcgtactgcgcttcccgcctgtcagtccactgctggatgaagacgcccgcttatgctccctttcggtttttgacgctttccgcttattacagaatctgttgaatgtaccgaaggaagaacgagaagcaatgttcttcggcggcctgttctcttatgaccttgtggcgggatttgaaaatttaccgcaactgtcagcggaaaatagctgccctgatttctgtttttatctcgctgaaacgctgatggtgattgaccatcagaaaaaaagcactcgtattcaggccagcctgtttgctccgaatgaagaagaaaaacaacgtctcactgctcgcctgaacgaactacgtcagcaactgaccgaagccgcgccgccgctgccggtggtttccgtgccgcatatgcgttgtgaatgtaaccagagcgatgaagagttcggtggtgtagtgcgtttgttgcaaaaagcgattcgcgccggagaaattttccaggtggtgccatctcgccgtttctctctgccctgcccgtcaccgctggcagcctattacgtgctgaaaaagagtaatcccagcccgtacatgttttttatgcaggataatgatttcaccctgtttggcgcgtcgccggaaagttcgctcaagtatgacgccaccagccgccagattgagatttacccgattgccggaacacgtccacgcggtcgtcgtgccgatggttcgctggacagagacctcgacagccgcatcgaactggagatgcgtaccgatcataaagagctttctgaacatctgatgctggtggatctcgcccgtaatgacctggcacgcatttgcacacccggcagccgctacgtcgccgatctcaccaaagttgaccgttactcttacgtgatgcacctagtctcccgcgttgttggtgagctgcgccacgatctcgacgccctgcacgcttaccgcgcctgtatgaatatggggacgttaagcggtgcaccgaaagtacgcgctatgcagttaattgccgaagcagaaggtcgtcgacgcggcagctacggcggcgcggtaggttattttaccgcgcatggcgatctcgacacctgcattgtgatccgctcggcgctggtggaaaacggtatcgccaccgtgcaagccggtgctggcgtagtccttgattctgttccgcagtcggaagccgacgaaactcgtaataaagcccgcgctgtactgcgcgctattgccaccgcgcatcatgcacaggagacgttctaatggctgacattctgctgctcgataatatcgactcttttacgtacaacctggcagatcagttgcgcagcaatggtcataacgtggtgatttaccgcaaccatattccggcgcagaccttaattgaacgcctggcgacgatgagcaatccggtgctgatgctttctcctggccccggtgtgccgagcgaagccggttgtatgccggaactcctcacccgcttgcgtggcaagctgccaattattggcatttgcctcggacatcaggcgattgtcgaagcttacgggggctatgtcggtcaggcgggcgaaattcttcacggtaaagcgtcgagcattgaacatgacggtcaggcgatgtttgccggattaacaaacccgctgccagtggcgcgttatcactcgctggttggcagtaacattccggccggtttaaccatcaacgcccattttaatggcatggtgatggcggtgcgtcacgatgcagatcgcgtttgtggattccagttccatccggaatccattcttactacccagggcgctcgcctgctggaacaaacgctggcctgggcgcagcagaaactagagccaaccaacacgctgcaaccgattctggaaaaactgtatcaggcacagacgcttagccaacaagaaagccaccagctgttttcagcggtggtacgtggcgagctgaagccggaacaactggcggcggcgctggtgagcatgaaaattcgcggtgaacacccgaacgagatcgccggggcagcaaccgcgctactggaaaacgccgcgccattcccgcgcccggattatctgtttgccgatatcgtcggtactggcggtgacggcagcaacagcatcaatatttctaccgccagtgcgtttgtcgccgcggcctgcgggctgaaagtggcgaaacacggcaaccgtagcgtctccagtaaatccggctcgtcggatctgctggcggcgttcggtattaatcttgatatgaacgccgataaatcgcgccaggcgctggatgagttaggcgtctgtttcctctttgcgccgaagtatcacaccggattccgccatgcgatgccggttcgccagcaactgaaaacccgcactctgttcaacgtgctgggaccattgattaacccggcgcatccgccgctggcgctaattggtgtttatagtccggaactggtgctgccgattgccgaaaccttgcgcgtgctggggtatcaacgcgcggcagtggtgcacagcggcgggatggatgaagtttcattacacgcgccgacaatcgttgccgaactacatgacggcgaaattaagagctatcaattgaccgctgaagattttggcctgacaccctaccaccaggagcaattggcaggcggaacaccggaagaaaaccgtgacattttaacacgcttgttacaaggtaaaggcgacgccgcccatgaagcagccgtcgcggcgaatgtcgccatgttaatgcgcctgcatggccatgaagatctgcaagccaatgcgcaaaccgttcttgaggtactgcgcagtggttccgcttacgacagagtcaccgcactggcggcacgagggtaaatgatgcaaaccgttttagcgaaaatcgtcgcagacaaggcgatttgggtagaaacccgcaaagagcagcaaccgctggccagttttcagaatgaggttcagccgagcacgcgacatttttatgatgcacttcagggcgcacgcacggcgtttattctggagtgtaaaaaagcgtcgccgtcaaaaggcgtgatccgtgatgatttcgatccggcacgcattgccgccatttataaacattacgcttcggcaatttcagtgctgactgatgagaaatattttcaggggagctttgatttcctccccatcgtcagccaaatcgccccgcagccgattttatgtaaagacttcattatcgatccttaccagatctatctggcgcgctattaccaggccgatgcctgcttattaatgctttcagtactggatgacgaacaatatcgccagcttgcagccgtcgcccacagtctggagatgggtgtgctgaccgaagtcagtaatgaagaggaactggagcgcgccattgcattgggggcaaaggtcgttggcatcaacaaccgcgatctgcgcgatttgtcgattgatctcaaccgtacccgcgagcttgcgccgaaactggggcacaacgtgacggtaatcagcgaatccggcatcaatacttacgctcaggtgcgcgagttaagccacttcgctaacggctttctgattggttcggcgttgatggcccatgacgatttgaacgccgccgtgcgtcgggtgttgctgggtgagaataaagtatgtggcctgacacgtgggcaagatgctaaagcagcttatgacgcgggcgcgatttacggtgggttgatttttgttgcgacatcaccgcgttgcgtcaacgttgaacaggcgcaggaagtgatggctgcagcaccgttgcagtatgttggcgtgttccgcaatcacgatattgccgatgtggcggacaaagctaaggtgttatcgctggcggcagtgcaactgcatggtaatgaagatcagctgtatatcgacaatctgcgtgaggctctgccagcacacgtcgccatctggaaggctttaagtgtcggtgaaactcttcccgcgcgcgattttcagcacatcgataaatatgtattcgacaacggtcagggcgggagcggacaacgtttcgactggtcactattaaatggtcaatcgcttggcaacgttctgctggcggggggcttaggcgcagataactgcgtggaagcggcacaaaccggctgcgccgggcttgattttaattctgctgtagagtcgcaaccgggtatcaaagacgcacgtcttttggcctcggttttccagacgctgcgcgcatattaaggaaaggaacaatgacaacattacttaacccctattttggtgagtttggcggcatgtacgtgccacaaatcctgatgcctgctctgcgccagctggaagaagcttttgtcagcgcgcaaaaagatcctgaatttcaggctcagttcaacgacctgctgaaaaactatgccgggcgtccaaccgcgctgaccaaatgccagaacattacagccgggacgaacaccacgctgtatctgaagcgcgaagatttgctgcacggcggcgcgcataaaactaaccaggtgctcggtcaggctttactggcgaagcggatgggtaaaactgaaattattgccgaaaccggtgccggtcagcatggcgtggcgtcggcccttgccagcgccctgctcggcctgaaatgccgaatttatatgggtgccaaagacgttgaacgccagtcgcccaacgttttccggatgcgcttaatgggtgcggaagtgatcccggtacatagcggttccgcgaccctgaaagatgcctgtaatgaggcgctacgcgactggtccggcagttatgaaaccgcgcactatatgctgggtaccgcagctggcccgcatccttacccgaccattgtgcgtgagtttcagcggatgattggcgaagaaacgaaagcgcagattctggaaagagaaggtcgcctgccggatgccgttatcgcctgtgttggcggtggttcgaatgccatcggtatgtttgcagatttcatcaacgaaaccgacgtcggcctgattggtgtggagcctggcggccacggtatcgaaactggcgagcacggcgcaccgttaaaacatggtcgcgtgggcatctatttcggtatgaaagcgccgatgatgcaaaccgaagacgggcaaattgaagagtcttactccatttctgccgggctggatttcccgtccgtcggcccgcaacatgcgtatctcaacagcactggacgcgctgattacgtgtctattaccgacgatgaagccctggaagcctttaaaacgctttgcctgcatgaagggatcatcccggcgctggaatcctcccacgccctggcccatgcgctgaaaatgatgcgcgaaaatccggaaaaagagcagctactggtggttaacctttccggtcgcggcgataaagacatcttcaccgttcacgatattttgaaagcacgaggggaaatctgatggaacgctacgaatctctgtttgcccagttgaaggagcgcaaagaaggcgcattcgttcctttcgtcaccctcggtgatccgggcattgagcagtcgttgaaaattatcgatacgctaattgaagccggtgctgacgcgctggagttaggcatccccttctccgacccactggcggatggcccgacgattcaaaacgccacactgcgtgcttttgcggcgggagtaaccccggcgcagtgctttgagatgctggcactcattcgccagaagcacccgaccattcccatcggccttttgatgtatgccaacctggtgtttaacaaaggcattgatgagttttatgccgagtgcgagaaagtcggcgtcgattcggtgctggttgccgatgtgcccgtggaagagtccgcgcccttccgccaggccgcgttgcgtcataatgtcgcacctatctttatttgcccgccgaatgccgacgatgatttgctgcgccagatagcctcttacggtcgtggttacacctatttgctgtcgcgagcgggcgtgaccggcgcagaaaaccgcgccgcgttacccctcaatcatctggttgcgaagctgaaagagtacaacgctgcgcctccattgcagggatttggtatttccgccccggatcaggtaaaagccgcgattgatgcaggagctgcgggcgcgatttctggttcggccatcgttaaaatcatcgagcaacatattaatgagccagagaaaatgctggcggcactgaaagcttttgtacaaccgatgaaagcggcgacgcgcagttaatacgcatggcatggatgaccgatggtagtgtggggtctccccatgcgagagtagggaactgccaggcatcaaataaaacgaaaggctcagtcgaaagactgggcctttcgttttatctgttgtttgtcggtgaacgctctcctgagtaggacaaatccgccgggagcggatttgaacgttgcgaagcaacggcccggagggtggcgggcaggacgcccgccataaactgccaggcatcaaattaagcagaaggccatcctgacggatggcctttttgcgtggccagtgccaagcttgcatgcgtgc

SEQ ID NO: 124 - DNA, 623 bp, Artificial Sequence
  Synthetic
taagacccactttcacatttaagttgtttttctaatccgcatatgatcaattcaaggccgaataagaaggctggctctgcaccttggtgatcaaataattcgatagcttgtcgtaataatggcggcatactatcagtagtaggtgtttccctttcttctttagcgacttgatgctcttgatcttccaatacgcaacctaaagtaaaatgccccacagcgctgagtgcatataatgcattctctagtgaaaaaccttgttggcataaaaaggctaattgattttcgagagtttcatactgtttttctgtaggccgtgtacctaaatgtacttttgctccatcgcgatgacttagtaaagcacatctaaaacttttagcgttattacgtaaaaaatcttgccagctttccccttctaaagggcaaaagtgagtatggtgcctatctaacatctcaatggctaaggcgtcgagcaaagcccgcttattttttacatgccaatacaatgtaggctgctctacacctagcttctgggcgagtttacgggttgttaaaccttcgattccgacctcattaagcagctctaatgcgctgttaatcactttacttttatctaatctagacat

SEQ ID NO: 125 - DNA, 124 bp, Artificial Sequence
  Synthetic
cattaattcctaatttttgttgacactctatcattgatagagttattttaccactccctatcagtgatagagaaaagtgaactctagaaataattttgtttaactttaagaaggagatatacat

SEQ ID NO: 126 - DNA, 1562 bp, Artificial Sequence
  Synthetic
atgcaaacacaaaaaccgactctcgaactgctaacctgcgaaggcgcttatcgcgacaacccgactgcgctttttcaccagttgtgtggggatcgtccggcaacgctgctgctggaatccgcagatatcgacagcaaagatgatttaaaaagcctgctgctggtagacagtgcgctgcgcattacagcattaagtgacactgtcacaatccaggcgctttccggcaatggagaagccctgttgacactactggataacgccttgcctgcgggtgtggaaaatgaacaatcaccaaactgccgcgtactgcgcttcccgcctgtcagtccactgctggatgaagacgcccgcttatgctccctttcggtttttgacgctttccgcttattacagaatctgttgaatgtaccgaaggaagaacgagaagcaatgttcttcggcggcctgttctcttatgaccttgtggcgggatttgaaaatttaccgcaactgtcagcggaaaatagctgccctgatttctgtttttatctcgctgaaacgctgatggtgattgaccatcagaaaaaaagcactcgtattcaggccagcctgtttgctccgaatgaagaagaaaaacaacgtctcactgctcgcctgaacgaactacgtcagcaactgaccgaagccgcgccgccgctgccggtggtttccgtgccgcatatgcgttgtgaatgtaaccagagcgatgaagagttcggtggtgtagtgcgtttgttgcaaaaagcgattcgcgccggagaaattttccaggtggtgccatctcgccgtttctctctgccctgcccgtcaccgctggcagcctattacgtgctgaaaaagagtaatcccagcccgtacatgttttttatgcaggataatgatttcaccctgtttggcgcgtcgccggaaagttcgctcaagtatgacgccaccagccgccagattgagatttacccgattgccggaacacgtccacgcggtcgtcgtgccgatggttcgctggacagagacctcgacagccgcatcgaactggagatgcgtaccgatcataaagagctttctgaacatctgatgctggtggatctcgcccgtaatgacctggcacgcatttgcacacccggcagccgctacgtcgccgatctcaccaaagttgaccgttactcttacgtgatgcacctagtctcccgcgttgttggtgagctgcgccacgatctcgacgccctgcacgcttaccgcgcctgtatgaatatggggacgttaagcggtgcaccgaaagtacgcgctatgcagttaattgccgaagcagaaggtcgtcgacgcggcagctacggcggcgcggtaggttattttaccgcgcatggcgatctcgacacctgcattgtgatccgctcggcgctggtggaaaacggtatcgccaccgtgcaagccggtgctggcgtagtccttgattctgttccgcagtcggaagccgacgaaactcgtaataaagcccgcgctgtactgcgcgctattgccaccgcgcatcatgcacaggagacgttcta

SEQ ID NO: 127 - protein, 520 aa, Artificial Sequence
  Synthetic
MQTQKPTLELLTCEGAYRDNPTALFHQLCGDRPATLLLESADIDSKDDLKSLLLVDSALRITALSDTVTIQALSGNGEALLTLLDNALPAGVENEQSPNCRVLRFPPVSPLLDEDARLCSLSVFDAFRLLQNLLNVPKEEREAMFFGGLFSYDLVAGFENLPQLSAENSCPDFCFYLAETLMVIDHQKKSTRIQASLFAPNEEEKQRLTARLNELRQQLTEAAPPLPVVSVPHMRCECNQSDEEFGGVVRLLQKAIRAGEIFQVVPSRRFSLPCPSPLAAYYVLKKSNPSPYMFFMQDNDFTLFGASPESSLKYDATSRQIEIYPIAGTRPRGRRADGSLDRDLDSRIELEMRTDHKELSEHLMLVDLARNDLARICTPGSRYVADLTKVDRYSYVMHLVSRVVGELRHDLDALHAYRACMNMGTLSGAPKVRAMQLIAEAEGRRRGSYGGAVGYFTAHGDLDTCIVIRSALVENGIATVQAGAGVVLDSVPQSEADETRNKARAVLRAIATAHHAQETF

SEQ ID NO: 128 - DNA, 1596 bp, Artificial Sequence
  Synthetic
atggctgacattctgctgctcgataatatcgactcttttacgtacaacctggcagatcagttgcgcagcaatggtcataacgtggtgatttaccgcaaccatattccggcgcagaccttaattgaacgcctggcgacgatgagcaatccggtgctgatgctttctcctggccccggtgtgccgagcgaagccggttgtatgccggaactcctcacccgcttgcgtggcaagctgccaattattggcatttgcctcggacatcaggcgattgtcgaagcttacgggggctatgtcggtcaggcgggcgaaattcttcacggtaaagcgtcgagcattgaacatgacggtcaggcgatgtttgccggattaacaaacccgctgccagtggcgcgttatcactcgctggttggcagtaacattccggccggtttaaccatcaacgcccattttaatggcatggtgatggcggtgcgtcacgatgcagatcgcgtttgtggattccagttccatccggaatccattcttactacccagggcgctcgcctgctggaacaaacgctggcctgggcgcagcagaaactagagccaaccaacacgctgcaaccgattctggaaaaactgtatcaggcacagacgcttagccaacaagaaagccaccagctgttttcagcggtggtacgtggcgagctgaagccggaacaactggcggcggcgctggtgagcatgaaaattcgcggtgaacacccgaacgagatcgccggggcagcaaccgcgctactggaaaacgccgcgccattcccgcgcccggattatctgtttgccgatatcgtcggtactggcggtgacggcagcaacagcatcaatatttctaccgccagtgcgtttgtcgccgcggcctgcgggctgaaagtggcgaaacacggcaaccgtagcgtctccagtaaatccggctcgtcggatctgctggcggcgttcggtattaatcttgatatgaacgccgataaatcgcgccaggcgctggatgagttaggcgtctgtttcctctttgcgccgaagtatcacaccggattccgccatgcgatgccggttcgccagcaactgaaaacccgcactctgttcaacgtgctgggaccattgattaacccggcgcatccgccgctggcgctaattggtgtttatagtccggaactggtgctgccgattgccgaaaccttgcgcgtgctggggtatcaacgcgcggcagtggtgcacagcggcgggatggatgaagtttcattacacgcgccgacaatcgttgccgaactacatgacggcgaaattaagagctatcaattgaccgctgaagattttggcctgacaccctaccaccaggagcaattggcaggcggaacaccggaagaaaaccgtgacattttaacacgcttgttacaaggtaaaggcgacgccgcccatgaagcagccgtcgcggcgaatgtcgccatgttaatgcgcctgcatggccatgaagatctgcaagccaatgcgcaaaccgttcttgaggtactgcgcagtggttccgcttacgacagagtcaccgcactggcggcacgagggtaa

SEQ ID NO: 129 - protein, 531 aa, Artificial Sequence
  Synthetic
MADILLLDNIDSFTYNLADQLRSNGHNVVIYRNHIPAQTLIERLATMSNPVLMLSPGPGVPSEAGCMPELLTRLRGKLPIIGICLGHQAIVEAYGGYVGQAGEILHGKASSIEHDGQAMFAGLTNPLPVARYHSLVGSNIPAGLTINAHFNGMVMAVRHDADRVCGFQFHPESILTTQGARLLEQTLAWAQQKLEPTNTLQPILEKLYQAQTLSQQESHQLFSAVVRGELKPEQLAAALVSMKIRGEHPNEIAGAATALLENAAPFPRPDYLFADIVGTGGDGSNSINISTASAFVAAACGLKVAKHGNRSVSSKSGSSDLLAAFGINLDMNADKSRQALDELGVCFLFAPKYHTGFRHAMPVRQQLKTRTLFNVLGPLINPAHPPLALIGVYSPELVLPIAETLRVLGYQRAAVVHSGGMDEVSLHAPTIVAELHDGEIKSYQLTAEDFGLTPYHQEQLAGGTPEENRDILTRLLQGKGDAAHEAAVAANVAMLMRLHGHEDLQANAQTVLEVLRSGSAYDRVTALAARG

SEQ ID NO: 130 - DNA, 1359 bp, Artificial Sequence
  Synthetic
atgcaaaccgttttagcgaaaatcgtcgcagacaaggcgatttgggtagaaacccgcaaagagcagcaaccgctggccagttttcagaatgaggttcagccgagcacgcgacatttttatgatgcacttcagggcgcacgcacggcgtttattctggagtgtaaaaaagcgtcgccgtcaaaaggcgtgatccgtgatgatttcgatccggcacgcattgccgccatttataaacattacgcttcggcaatttcagtgctgactgatgagaaatattttcaggggagctttgatttcctccccatcgtcagccaaatcgccccgcagccgattttatgtaaagacttcattatcgatccttaccagatctatctggcgcgctattaccaggccgatgcctgcttattaatgctttcagtactggatgacgaacaatatcgccagcttgcagccgtcgcccacagtctggagatgggtgtgctgaccgaagtcagtaatgaagaggaactggagcgcgccattgcattgggggcaaaggtcgttggcatcaacaaccgcgatctgcgcgatttgtcgattgatctcaaccgtacccgcgagcttgcgccgaaactggggcacaacgtgacggtaatcagcgaatccggcatcaatacttacgctcaggtgcgcgagttaagccacttcgctaacggctttctgattggttcggcgttgatggcccatgacgatttgaacgccgccgtgcgtcgggtgttgctgggtgagaataaagtatgtggcctgacacgtgggcaagatgctaaagcagcttatgacgcgggcgcgatttacggtgggttgatttttgttgcgacatcaccgcgttgcgtcaacgttgaacaggcgcaggaagtgatggctgcagcaccgttgcagtatgttggcgtgttccgcaatcacgatattgccgatgtggcggacaaagctaaggtgttatcgctggcggcagtgcaactgcatggtaatgaagatcagctgtatatcgacaatctgcgtgaggctctgccagcacacgtcgccatctggaaggctttaagtgtcggtgaaactcttcccgcgcgcgattttcagcacatcgataaatatgtattcgacaacggtcagggcgggagcggacaacgtttcgactggtcactattaaatggtcaatcgcttggcaacgttctgctggcggggggcttaggcgcagataactgcgtggaagcggcacaaaccggctgcgccgggcttgattttaattctgctgtagagtcgcaaccgggtatcaaagacgcacgtcttttggcctcggttttccagacgctgcgcgcatattaa

SEQ ID NO: 131 - protein, 452 aa, Artificial Sequence
  Synthetic
MQTVLAKIVADKAIWVETRKEQQPLASFQNEVQPSTRHFYDALQGARTAFILECKKASPSKGVIRDDFDPARIAAIYKHYASAISVLTDEKYFQGSFDFLPIVSQIAPQPILCKDFIIDPYQIYLARYYQADACLLMLSVLDDEQYRQLAAVAHSLEMGVLTEVSNEEELERAIALGAKVVGINNRDLRDLSIDLNRTRELAPKLGHNVTVISESGINTYAQVRELSHFANGFLIGSALMAHDDLNAAVRRVLLGENKVCGLTRGQDAKAAYDAGAIYGGLIFVATSPRCVNVEQAQEVMAAAPLQYVGVFRNHDIADVADKAKVLSLAAVQLHGNEDQLYIDNLREALPAHVAIWKALSVGETLPARDFQHIDKYVFDNGQGGSGQRFDWSLLNGQSLGNVLLAGGLGADNCVEAAQTGCAGLDFNSAVESQPGIKDARLLASVFQTLRAY

SEQ ID NO: 132 - DNA, 1194 bp, Artificial Sequence
  Synthetic
atgacaacattacttaacccctattttggtgagtttggcggcatgtacgtgccacaaatcctgatgcctgctctgcgccagctggaagaagcttttgtcagcgcgcaaaaagatcctgaatttcaggctcagttcaacgacctgctgaaaaactatgccgggcgtccaaccgcgctgaccaaatgccagaacattacagccgggacgaacaccacgctgtatctgaagcgcgaagatttgctgcacggcggcgcgcataaaactaaccaggtgctcggtcaggctttactggcgaagcggatgggtaaaactgaaattattgccgaaaccggtgccggtcagcatggcgtggcgtcggcccttgccagcgccctgctcggcctgaaatgccgaatttatatgggtgccaaagacgttgaacgccagtcgcccaacgttttccggatgcgcttaatgggtgcggaagtgatcccggtacatagcggttccgcgaccctgaaagatgcctgtaatgaggcgctacgcgactggtccggcagttatgaaaccgcgcactatatgctgggtaccgcagctggcccgcatccttacccgaccattgtgcgtgagtttcagcggatgattggcgaagaaacgaaagcgcagattctggaaagagaaggtcgcctgccggatgccgttatcgcctgtgttggcggtggttcgaatgccatcggtatgtttgcagatttcatcaacgaaaccgacgtcggcctgattggtgtggagcctggcggccacggtatcgaaactggcgagcacggcgcaccgttaaaacatggtcgcgtgggcatctatttcggtatgaaagcgccgatgatgcaaaccgaagacgggcaaattgaagagtcttactccatttctgccgggctggatttcccgtccgtcggcccgcaacatgcgtatctcaacagcactggacgcgctgattacgtgtctattaccgacgatgaagccctggaagcctttaaaacgctttgcctgcatgaagggatcatcccggcgctggaatcctcccacgccctggcccatgcgctgaaaatgatgcgcgaaaatccggaaaaagagcagctactggtggttaacctttccggtcgcggcgataaagacatcttcaccgttcacgatattttgaaagcacgaggggaaatctga

SEQ ID NO: 133 - protein, 397 aa, Artificial Sequence
  Synthetic
MTTLLNPYFGEFGGMYVPQILMPALRQLEEAFVSAQKDPEFQAQFNDLLKNYAGRPTALTKCQNITAGTNTTLYLKREDLLHGGAHKTNQVLGQALLAKRMGKTEIIAETGAGQHGVASALASALLGLKCRIYMGAKDVERQSPNVFRMRLMGAEVIPVHSGSATLKDACNEALRDWSGSYETAHYMLGTAAGPHPYPTIVREFQRMIGEETKAQILEREGRLPDAVIACVGGGSNAIGMFADFINETDVGLIGVEPGGHGIETGEHGAPLKHGRVGIYFGMKAPMMQTEDGQIEESYSISAGLDFPSVGPQHAYLNSTGRADYVSITDDEALEAFKTLCLHEGIIPALESSHALAHALKMMRENPEKEQLLVVNLSGRGDKDIFTVHDILKARGEI

SEQ ID NO: 134 - DNA, 807 bp, Artificial Sequence
  Synthetic
atggaacgctacgaatctctgtttgcccagttgaaggagcgcaaagaaggcgcattcgttcctttcgtcaccctcggtgatccgggcattgagcagtcgttgaaaattatcgatacgctaattgaagccggtgctgacgcgctggagttaggcatccccttctccgacccactggcggatggcccgacgattcaaaacgccacactgcgtgcttttgcggcgggagtaaccccggcgcagtgctttgagatgctggcactcattcgccagaagcacccgaccattcccatcggccttttgatgtatgccaacctggtgtttaacaaaggcattgatgagttttatgccgagtgcgagaaagtcggcgtcgattcggtgctggttgccgatgtgcccgtggaagagtccgcgcccttccgccaggccgcgttgcgtcataatgtcgcacctatctttatttgcccgccgaatgccgacgatgatttgctgcgccagatagcctcttacggtcgtggttacacctatttgctgtcgcgagcgggcgtgaccggcgcagaaaaccgcgccgcgttacccctcaatcatctggttgcgaagctgaaagagtacaacgctgcgcctccattgcagggatttggtatttccgccccggatcaggtaaaagccgcgattgatgcaggagctgcgggcgcgatttctggttcggccatcgttaaaatcatcgagcaacatattaatgagccagagaaaatgctggcggcactgaaagcttttgtacaaccgatgaaagcggcgacgcgcagttaa

SEQ ID NO: 135 - protein, 268 aa, Artificial Sequence
  Synthetic
MERYESLFAQLKERKEGAFVPFVTLGDPGIEQSLKIIDTLIEAGADALELGIPFSDPLADGPTIQNATLRAFAAGVTPAQCFEMLALIRQKHPTIPIGLLMYANLVFNKGIDEFYAECEKVGVDSVLVADVPVEESAPFRQAALRHNVAPIFICPPNADDDLLRQIASYGRGYTYLLSRAGVTGAENRAALPLNHLVAKLKEYNAAPPLQGFGISAPDQVKAAIDAGAAGAISGSAIVKIIEQHINEPEKMLAALKAFVQPMKAATRS

SEQ ID NO: 136 - protein, 350 aa, E. coli
MNYQNDDLRIKEIKELLPPVALLEKFPATENAANTVAHARKAIHKILKGNDDRLLVVIGPCSIHDPVAAKEYATRLLTLREELQDELEIVMRVYFEKPRTTVGWKGLINDPHMDNSFQINDGLRIARKLLLDINDSGLPAAGEFLDMITLQYLADLMSWGAIGARTTESQVHRELASGLSCPVGFKNGTDGTIKVAIDAINAAGAPHCFLSVTKWGHSAIVNTSGNGDCHIILRGGKEPNYSAKHVAEVKEGLNKAGLPAQVMIDFSHANSSKQFKKQMDVCTDVCQQIAGGEKAIIGVMVESHLVEGNQSLESGEPLAYGKSITDACIGWDDTDALLRQLASAVKARRG

SEQ ID NO: 137 - protein, 520 aa, E. coli
MQTQKPTLELLTCEGAYRDNPTALFHQLCGDRPATLLLEFADIDSKDDLKSLLLVDSALRITALSDTVTIQALSGNGEALLTLLDNALPAGVENEQSPNCRVLRFPPVSPLLDEDARLCSLSVFDAFRLLQNLLNVPKEEREAMFFGGLFSYDLVAGFENLPQLSAENSCPDFCFYLAETLMVIDHQKKSTRIQASLFAPNEEEKQRLTARLNELRQQLTEAAPPLPVVSVPHMRCECNQSDEEFGGVVRLLQKAIRAGEIFQVVPSRRFSLPCPSPLAAYYVLKKSNPSPYMFFMQDNDFTLFGASPESSLKYDATSRQIEIYPIAGTRPRGRRADGSLDRDLDSRIELEMRTDHKELSEHLMLVDLARNDLARICTPGSRYVADLTKVDRYSYVMHLVSRVVGELRHDLDALHAYRACMNMGTLSGAPKVRAMQLIAEAEGRRRGSYGGAVGYFTAHGDLDTCIVIRSALVENGIATVQAGAGVVLDSVPQSEADETRNKARAVLRAIATAHHAQETF

SEQ ID NO: 138 - protein, 410 aa, E. coli
MAKVSLEKDKIKFLLVEGVHQKALESLRAAGYTNIEFHKGALDDEQLKESIRDAHFIGLRSRTHLTEDVINAAEKLVAIGCFCIGTNQVDLDAAAKRGIPVFNAPFSNTRSVAELVIGELLLLLRGVPEANAKAHRGVWNKLAAGSFEARGKKLGIIGYGHIGTQLGILAESLGMYVYFYDIENKLPLGNATQVQHLSDLLNMSDVVSLHVPENPSTKNMMGAKEISLMKPGSLLINASRGTVVDIPALCDALASKHLAGAAIDVFPTEPATNSDPFTSPLCEFDNVLLTPHIGGSTQEAQENIGLEVAGKLIKYSDNGSTLSAVNFPEVSLPLHGGRRLMHIHENRPGVLTALNKIFAEQGVNIAAQYLQTSAQMGYVVIDIEADEDVAEKALQAMKAIPGTIRARLLY

SEQ ID NO: 139 - protein, 410 aa, E. coli
MAKVSLEKDKIKFLLVEGVHQKALESLRAAGYTNIEFHKGALDDEQLKESIRDAHFIGLRSRTHLTEDVINAAEKLVAIGCFCIGTNQVDLDAAAKRGIPVFNAPFSNTRSVAELVIGELLLLLRGVPEANAKAHRGVWNKLAAGSFEARGKKLGIIGYGHIGTQLGILAESLGMYVYFYDIENKLPLGNATQVQHLSDLLNMSDVVSLHVPENPSTKNMMGAKEISLMKPGSLLINASRGTVVDIPALCDALASKHLAGAAIDVFPTEPATNSDPFTSPLCEFDNVLLTPHIGGSTQEAQENIGLEVAGKLIKYSDNGSTLSAVNFPEVSLPLHGGRRLMHIAEARPGVLTALNKIFAEQGVNIAAQYLQTSAQMGYVVIDIEADEDVAEKALQAMKAIPGTIRARLLY

SEQ ID NO: 140 - protein, 471 aa, E. coli
MENFKHLPEPFRIRVIEPVKRTTRAYREEAIIKSGMNPFLLDSEDVFIDLLTDSGTGAVTQSMQAAMMRGDEAYSGSRSYYALAESVKNIFGYQYTIPTHQGRGAEQIYIPVLIKKREQEKGLDRSKMVAFSNYFFDTTQGHSQINGCTVRNVYIKEAFDTGVRYDFKGNFDLEGLERGIEEVGPNNVPYIVATITSNSAGGQPVSLANLKVMYSIAKKYDIPVVMDSARFAENAYFIKQREAEYKDWTIEQITRETYKYADMLAMSAKKDAMVPMGGLLCMKDDSFFDVYTECRTLCVVQEGFPTYGGLEGGAMERLAVGLYDGMNLDWLAYRIAQVQYLVDGLEEIGVVCQQAGGHAAFVDAGKLLPHIPADQFPAQALACELYKVAGIRAVEIGSFLLGRDPKTGKQLPCPAELLRLTIPRATYTQTHMDFIIEAFKHVKENAANIKGLTFTYEPKVLRHFTAKLKEV

SEQ ID NO: 141 - protein, 500 aa, Catharanthus roseus
MGSIDSTNVAMSNSPVGEFKPLEAEEFRKQAHRMVDFIADYYKNVETYPVLSEVEPGYLRKRIPETAPYLPEPLDDIMKDIQKDIIPGMTNWMSPNFYAFFPATVSSAAFLGEMLSTALNSVGFTWVSSPAATELEMIVMDWLAQILKLPKSFMFSGTGGGVIQNTTSESILCTIIAARERALEKLGPDSIGKLVCYGSDQTHTMFPKTCKLAGIYPNNIRLIPTTVETDFGISPQVLRKMVEDDVAAGYVPLFLCATLGTTSTTATDPVDSLSEIANEFGIWIHVDAAYAGSACICPEFRHYLDGIERVDSLSLSPHKWLLAYLDCTCLWVKQPHLLLRALTTNPEYLKNKQSDLDKVVDFKNWQIATGRKFRSLKLWLILRSYGVVNLQSHIRSDVAMGKMFEEWVRSDSRFEIVVPRNFSLVCFRLKPDVSSLHVEEVNKKLLDMLNSTGRVYMTHTIVGGIYMLRLAVGSSLTEEHHVRRVWDLIQKLTDDLLKEA

SEQ ID NO: 142 - protein, 417 aa, Clostridium sporogenes
MKFWRKYTQQEMDEKITESLEKTLNYDNTKTIGIPGTKLDDTVFYDDHSFVKHSPYLRTFIQNPNHIGCHTYDKADILFGGTFDIERELIQLLAIDVLNGNDEEFDGYVTQGGTEANIQAMWVYRNYFKKERKAKHEEIAIITSADTHYSAYKGSDLLNIDIIKVPVDFYSRKIQENTLDSIVKEAKEIGKKYFIVISNMGTTMFGSVDDPDLYANIFDKYNLEYKIHVDGAFGGFIYPIDNKECKTDFSNKNVSSITLDGHKMLQAPYGTGIFVSRKNLIHNTLTKEATYIENLDVTLSGSRSGSNAVAIWMVLASYGPYGWMEKINKLRNRTKWLCKQLNDMRIKYYKEDSMNIVTIEEQYVNKEIAEKYFLVPEVHNPTNNWYKIVVMEHVELDILNSLVYDLRKFNKEHLKAM

SEQ ID NO: 143 - protein, 757 aa, E. coli
MGSPSLYSARKTTLALAVALSFAWQAPVFAHGGEAHMVPMDKTLKEFGADVQWDDYAQLFTLIKDGAYVKVKPGAQTAIVNGQPLALQVPVVMKDNKAWVSDTFINDVFQSGLDQTFQVEKRPHPLNALTADEIKQAVEIVKASADFKPNTRFTEISLLPPDKEAVWAFALENKPVDQPRKADVIMLDGKHIIEAVVDLQNNKLLSWQPIKDAHGMVLLDDFASVQNIINNSEEFAAAVKKRGITDAKKVITTPLTVGYFDGKDGLKQDARLLKVISYLDVGDGNYWAHPIENLVAVVDLEQKKIVKIEEGPVVPVPMTARPFDGRDRVAPAVKPMQIIEPEGKNYTITGDMIHWRNWDFHLSMNSRVGPMISTVTYNDNGTKRKVMYEGSLGGMIVPYGDPDIGWYFKAYLDSGDYGMGTLTSPIARGKDAPSNAVLLNETIADYTGVPMEIPRAIAVFERYAGPEYKHQEMGQPNVSTERRELVVRWISTVGNYDYIFDWIFHENGTIGIDAGATGIEAVKGVKAKTMHDETAKDDTRYGTLIDHNIVGTTHQHIYNFRLDLDVDGENNSLVAMDPVVKPNTAGGPRTSTMQVNQYNIGNEQDAAQKFDPGTIRLLSNPNKENRMGNPVSYQIIPYAGGTHPVAKGAQFAPDEWIYHRLSFMDKQLWVTRYHPGERFPEGKYPNRSTHDTGLGQYSKDNESLDNTDAVVWMTTGTTHVARAEEWPIMPTEWVHTLLKPWNFFDETPTLGALKKDK

SEQ ID NO: 144 - protein, 1368 aa, Arabidopsis thaliana
MGEKAIDEDKVEAMKSSKTSLVFAINGQRFELELSSIDPSTTLVDFLRNKTPFKSVKLGCGEGGCGACVVLLSKYDPLLEKVDEFTISSCLTLLCSIDGCSITTSDGLGNSRVGFHAVHERIAGFHATQCGFCTPGMSVSMFSALLNADKSHPPPRSGFSNLTAVEAEKAVSGNLCRCTGYRPLVDACKSFAADVDIEDLGFNAFCKKGENRDEVLRRLPCYDHTSSHVCTFPEFLKKEIKNDMSLHSRKYRWSSPVSVSELQGLLEVENGLSVKLVAGNTSTGYYKEEKERKYERFIDIRKIPEFTMVRSDEKGVELGACVTISKAIEVLREEKNVSVLAKIATHMEKIANRFVRNTGTIGGNIMMAQRKQFPSDLATILVAAQATVKIMTSSSSQEQFTLEEFLQQPPLDAKSLLLSLEIPSWHSAKKNGSSEDSILLFETYRAAPRPLGNALAFLNAAFSAEVTEALDGIVVNDCQLVFGAYGTKHAHRAKKVEEFLTGKVISDEVLMEAISLLKDEIVPDKGTSNPGYRSSLAVTFLFEFFGSLTKKNAKTTNGWLNGGCKEIGFDQNVESLKPEAMLSSAQQIVENQEHSPVGKGITKAGACLQASGEAVYVDDIPAPENCLYGAFIYSTMPLARIKGIRFKQNRVPEGVLGIITYKDIPKGGQNIGTNGFFTSDLLFAEEVTHCAGQIIAFLVADSQKHADIAANLVVIDYDTKDLKPPILSLEEAVENFSLFEVPPPLRGYPVGDITKGMDEAEHKILGSKISFGSQYFFYMETQTALAVPDEDNCMVVYSSTQTPEFVHQTIAGCLGVPENNVRVITRRVGGGFGGKAVKSMPVAAACALAASKMQRPVRTYVNRKTDMITTGGRHPMKVTYSVGFKSNGKITALDVEVLLDAGLTEDISPLMPKGIQGALMKYDWGALSFNVKVCKTNTVSRTALRAPGDVQGSYIGEAIIEKVASYLSVDVDEIRKVNLHTYESLRLFHSAKAGEFSEYTLPLLWDRIDEFSGFNKRRKVVEEFNASNKWRKRGISRVPAVYAVNMRSTPGRVSVLGDGSIVVEVQGIEIGQGLWTKVKQMAAYSLGLIQCGTTSDELLKKIRVIQSDTLSMVQGSMTAGSTTSEASSEAVRICCDGLVERLLPVKTALVEQTGGPVTWDSLISQAYQQSINMSVSSKYMPDSTGEYLNYGIAASEVEVNVLTGETTILRTDIIYDCGKSLNPAVDLGQIEGAFVQGLGFFMLEEFLMNSDGLVVTDSTWTYKIPTVDTIPRQFNVEILNSGQHKNRVLSSKASGEPPLLLAASVHCAVRAAVKEARKQILSWNSNKQGTDMYFELPVPATMPIVKEFCGLDVVEKYLEWKIQQRKNV

SEQ ID NO: 145 - protein, 513 aa, S. cerevisae
MTAGSAPPVDYTSLKKNFQPFLSRRVENRSLKSFWDASDISDDVIELAGGMPNERFFPIESMDLKISKVPFNDNPKWHNSFTTAHLDLGSPSELPIARSFQYAETKGLPPLLHFVKDFVSRINRPAFSDETESNWDVILSGGSNDSMFKVFETICDESTTVMIEEFTFTPAMSNVEATGAKVIPIKMNLTFDRESQGIDVEYLTQLLDNWSTGPYKDLNKPRVLYTIATGQNPTGMSVPQWKREKIYQLAQRHDFLIVEDDPYGYLYFPSYNPQEPLENPYHSSDLTTERYLNDFLMKSFLTLDTDARVIRLETFSKIFAPGLRLSFIVANKFLLQKILDLADITTRAPSGTSQAIVYSTIKAMAESNLSSSLSMKEAMFEGWIRWIMQIASKYNHRKNLTLKALYETESYQAGQFTVMEPSAGMFIIIKINWGNFDRPDDLPQQMDILDKFLLKNGVKVVLGYKMAVCPNYSKQNSDFLRLTIAYARDDDQLIEASKRIGSGIKEFFDNYKS

SEQ ID NO: 146 - protein, 396 aa, E. coli
MFENITAAPADPILGLADLFRADERPGKINLGIGVYKDETGKTPVLTSVKKAEQYLLENETTKNYLGIDGIPEFGRCTQELLFGKGSALINDKRARTAQTPGGTGALRVAADFLAKNTSVKRVWVSNPSWPNHKSVFNSAGLEVREYAYYDAENHTLDFDALINSLNEAQAGDVVLFHGCCHNPTGIDPTLEQWQTLAQLSVEKGWLPLFDFAYQGFARGLEEDAEGLRAFAAMHKELIVASSYSKNFGLYNERVGACTLVAADSETVDRAFSQMKAAIRANYSNPPAHGASVVATILSNDALRAIWEQELTDMRQRIQRMRQLFVNTLQEKGANRDFSFIIKQNGMFSFSGLTKEQVLRLREEFGVYAVASGRVNVAGMTPDNMAPLCEAIVAVL

SEQ ID NO: 147 - protein, 391 aa, Arabidopsis thaliana
MVKLENSRKPEKISNKNIPMSDFVVNLDHGDPTAYEEYWRKMGDRCTVTIRGCDLMSYFSDMTNLCWFLEPELEDAIKDLHGVVGNAATEDRYIVVGTGSTQLCQAAVHALSSLARSQPVSVVAAAPFYSTYVEETTYVRSGMYKWEGDAWGFDKKGPYIELVTSPNNPDGTIRETVVNRPDDDEAKVIHDFAYYWPHYTPITRRQDHDIMLFTFSKITGHAGSRIGWALVKDKEVAKKMVEYIIVNSIGVSKESQVRTAKILNVLKETCKSESESENFFKYGREMMKNRWEKLREVVKESDAFTLPKYPEAFCNYFGKSLESYPAFAWLGTKEETDLVSELRRHKVMSRAGERCGSDKKHVRVSMLSREDVFNVFLERLANMKLIKSIDL

SEQ ID NO: 148 - protein, 504 aa, streptomyces sp. TP A0274
MTAPLQDSDGPDDAIGGPKQVTVIGAGIAGLVTAYELERLGHHVQIIEGSDDIGGRIHTHRFSGAGGPGPFAEMGAMRIPAGHRLTMHYIAELGLQNQVREFRTLFSDDAAYLPSSAGYLRVREAHDTLVDEFATGLPSAHYRQDTLLFGAWLDASIRAIAPRQFYDGLHNDIGVELLNLVDDIDLTPYRCGTARNRIDLHALFADHPRVRASCPPRLERFLDDVLDETSSSIVRLKDGMDELPRRLASRIRGKISLGQEVTGIDVHDDTVTLTVRQGLRTVTRTCDYVVCTIPFTVLRTLRLTGFDQDKLDIVHETKYWPATKIAFHCREPFWEKDGISGGASFTGGHVRQTYYPPAEGDPALGAVLLASYTIGPDAEALARMDEAERDALVAKELSVMHPELRRPGMVLAVAGRDWGARRWSRGAATVRWGQEAALREAERRECARPQKGLFFAGEHCSSKPAWIEGAIESAIDAAHEIEWYEPRASRVFAASRLSRSDRSA

SEQ ID NO: 149 - protein, 552 aa, Enterobacter cloacae
MRTPYCVADYLLDRLTDCGADHLFGVPGDYNLQFLDHVIDSPDICWVGCANELNASYAADGYARCKGFAALLTTFGVGELSAMNGIAGSYAEHVPVLHIVGAPGTAAQQRGELLHHTLGDGEFRHFYHMSEPITVAQAVLTEQNACYEIDRVLTTMLRERRPGYLMLPADVAKKAATPPVNALTHKQAHADSACLKAFRDAAENKLAMSKRTALLADFLVLRHGLKHALQKWVKEVPMAHATMLMGKGIFDERQAGFYGTYSGSASTGAVKEAIEGADTVLCVGTRFTDTLTAGFTHQLTPAQTIEVQPHAARVGDVWFTGIPMNQAIETLVELCKQHVHAGLMSSSSGAIPFPQPDGSLTQENFWRTLQTFIRPGDIILADQGTSAFGAIDLRLPADVNFIVQPLWGSIGYTLAAAFGAQTACPNRRVIVLTGDGAAQLTIQELGSMLRDKQHPIILVLNNEGYTVERAIHGAEQRYNDIALWNWTHIPQALSLDPQSECWRVSEAEQLADVLEKVAHHERLSLIEVMLPKADIPPLLGALTKALEACNNA

SEQ ID NO: 150 - protein, 497 aa, Ustilago maydis
MPTLNLDLPNGIKSTIQADLFINNKFVPALDGKTFATINPSTGKEIGQVAEASAKDVDLAVKAAREAFETTWGENTPGDARGRLLIKLAELVEANIDELAAIESLDNGKAFSIAKSFDVAAVAANLRYYGGWADKNHGKVMEVDTKRLNYTRHEPIGVCGQIIPWNFPLLMFAWKLGPALATGNTIVLKTAEQTPLSAIKMCELIVEAGFPPGVVNVISGFGPVAGAAISQHMDIDKIAFTGSTLVGRNIMKAAASTNLKKVTLELGGKSPNIIFKDADLDQAVRWSAFGIMFNHGQCCCAGSRVYVEESIYDAFMEKMTAHCKALQVGDPFSANTFQGPQVSQLQYDRIMEYIESGKKDANLALGGVRKGNEGYFIEPTIFTDVPHDAKIAKEEIFGPVVVVSKFKDEKDLIRIANDSIYGLAAAVFSRDISRAIETAHKLKAGTVWVNCYNQLIPQVPFGGYKASGIGRELGEYALSNYTNIKAVHVNLSQPAPI

SEQ ID NO: 151 - protein, 415 aa, Arabidopsis thaliana
MEFVTETLGKRIHDPYVEETRCLMIPGPIIVGSGPSGLATAACLKSRDIPSLILERSTCIASLWQHKTYDRLRLHLPKDFCELPLMPFPSSYPTYPTKQQFVQYLESYAEHFDLKPVFNQTVEEAKFDRRCGLWRVRTTGGKKDETMEYVSRWLVVATGENAEEVMPEIDGIPDFGGPILHTSSYKSGEIFSEKKILVVGCGNSGMEVCLDLCNFNALPSLVVRDSVHVLPQEMLGISTFGISTSLLKWFPVHVVDRFLLRMSRLVLGDTDRLGLVRPKLGPLERKIKCGKTPVLDVGTLAKIRSGHIKVYPELKRVMHYSAEFVDGRVDNFDAIILATGYKSNVPMWLKGVNMFSEKDGFPHKPFPNGWKGESGLYAVGFTKLGLLGAAIDAKKIAEDIEVQRHFLPLARPQHC

SEQ ID NO: 152 - protein, 557 aa, Pseudomonas savastanoi
MYDHFNSPSIDILYDYGPFLKKCEMTGGIGSYSAGTPTPRVAIVGAGISGLVAATELLRAGVKDVVLYESRDRIGGRVWSQVFDQTRPRYIAEMGAMRFPPSATGLFHYLKKFGISTSTTFPDPGVVDTELHYRGKRYHWPAGKKPPELFRRVYEGWQSLLSEGYLLEGGSLVAPLDITAMLKSGRLEEAAIAWQGWLNVFRDCSFYNAIVCIFTGRHPPGGDRWARPEDFELFGSLGIGSGGFLPVFQAGFTEILRMVINGYQSDQRLIPDGISSLAARLADQSFDGKALRDRVCFSRVGRISREAEKIIIQTEAGEQRVFDRVIVTSSNRAMQMIHCLTDSESFLSRDVARAVRETHLTGSSKLFILTRTKFWIKNKLPTTIQSDGLVRGVYCLDYQPDEPEGHGVVLLSYTWEDDAQKMLAMPDKKTRCQVLVDDLAAIHPTFASYLLPVDGDYERYVLHHDWLTDPHSAGAFKLNYPGEDVYSQRLFFQPMTANSPNKDTGLYLAGCSCSFAGGWIEGAVQTALNSACAVLRSTGGQLSKGNPLDCINASYRY

SEQ ID NO: 153 - protein, 455 aa, Pseudomonas savastanoi
MHEIITLESLCQALADGEIAAAELRERALDTEARLARLNCFIREGDAVSQFGEADHAMKGTPLWGMPVSFKDNICVRGLPLTAGTRGMSGFVSDQDAAIVSQLRALGAVVAGKNNMHELSFGVTSINPHWGTVGNPVAPGYCAGGSSGGSAAAVASGIVPLSVGTDTGGSIRIPAAFCGITGFRPTTGRWSTAGIIPVSHTKDCVGLLTRTAGDAGFLYGLLSGKQQSFPLSRTAPCRIGLPVSMWSDLDGEVERACVNALSLLRKTGFEFIEIDDADIVELNQTLTFTVPLYEFFADLAQSLLSLGWKHGIHHIFAQVDDANVKGIINHHLGEGAIKPAHYLSSLQNGELLKRKMDELFARHNIELLGYPTVPCRVPHLDHADRPEFFSQAIRNTDLASNAMLPSITIPVGPEGRLPVGLSFDALRGRDALLLSRVSAIEQVLGFVRKVLPHTT

SEQ ID NO: 154 - protein, 353 aa, Nostoc punctiforme NIES 2108
MLLFETVREMGHEQVLFCHSKNPEIKAIIAIHDTTLGPAMGATRILPYINEEAALKDALRLSRGMTYKAACANIPAGGGKAVIIANPENKTDDLLRAYGRFVDSLNGRFITGQDVNITPDDVRTISQETKYVVGVSEKSGGPAPITSLGVFLGIKAAVESRWQSKRLDGMKVAVQGLGNVGKNLCRHLHEHDVQLFVSDVDPIKAEEVKRLFGATVVEPTEIYSLDVDIFAPCALGGILNSHTIPFLQASIIAGAANNQLENEQLHSQMLAKKGILYSPDYVINAGGLINVYNEMIGYDEEKAFKQVHNIYDTLLAIFEIAKEQGVTTNDAARRLAEDRINNSKRSKSKAIAA

SEQ ID NO: 155 - protein, 541 aa, Arabidopsis thaliana
MNTFTSNSSDLTTTATETSSFSTLYLLSTLQAFVAITLVMLLKKLMTDPNKKKPYLPPGPTGWPIIGMIPTMLKSRPVFRWLHSIMKQLNTEIACVKLGNTHVITVTCPKIAREILKQQDALFASRPLTYAQKILSNGYKTCVITPFGDQFKKMRKVVMTELVCPARHRWLHQKRSEENDHLTAWVYNMVKNSGSVDFRFMTRHYCGNAIKKLMFGTRTFSKNTAPDGGPTVEDVEHMEAMFEALGFTFAFCISDYLPMLTGLDLNGHEKIMRESSAIMDKYHDPIIDERIKMWREGKRTQIEDFLDIFISIKDEQGNPLLTADEIKPTIKELVMAAPDNPSNAVEWAMAEMVNKPEILRKAMEEIDRVVGKERLVQESDIPKLNYVKAILREAFRLHPVAAFNLPHVALSDTTVAGYHIPKGSQVLLSRYGLGRNPKVWADPLCFKPERHLNECSEVTLTENDLRFISFSTGKRGCAAPALGTALTTMMLARLLQGFTWKLPENETRVELMESSHDMFLAKPLVMVGDLRLPEHLYPTVK

SEQ ID NO: 156 - protein, 543 aa, Arabidopsis thaliana
MDTLASNSSDLTTKSSLGMSSFTNMYLLTTLQALAALCFLMILNKIKSSSRNKKLHPLPPGPTGFPIVGMIPAMLKNRPVFRWLHSLMKELNTEIACVRLGNTHVIPVTCPKIAREIFKQQDALFASRPLTYAQKILSNGYKTCVITPFGEQFKKMRKVIMTEIVCPARHRWLHDNRAEETDHLTAWLYNMVKNSEPVDLRFVTRHYCGNAIKRLMFGTRTFSEKTEADGGPTLEDIEHMDAMFEGLGFTFAFCISDYLPMLTGLDLNGHEKIMRESSAIMDKYHDPIIDERIKMWREGKRTQIEDFLDIFISIKDEAGQPLLTADEIKPTIKELVMAAPDNPSNAVEWAIAEMINKPEILHKAMEEIDRVVGKERFVQESDIPKLNYVKAIIREAFRLHPVAAFNLPHVALSDTTVAGYHIPKGSQVLLSRYGLGRNPKVWSDPLSFKPERHLNECSEVTLTENDLRFISFSTGKRGCAAPALGTAITTMMLARLLQGFKWKLAGSETRVELMESSHDMFLSKPLVLVGELRLSEDLYPMVK

SEQ ID NO: 157 - protein, 503 aa, Arabidopis thaliana
MSNIQEMEMILSISLCLTTLITLLLLRRFLKRTATKVNLPPSPWRLPVIGNLHQLSLHPHRSLRSLSLRYGPLMLLHFGRVPILVVSSGEAAQEVLKTHDHKFANRPRSKAVHGLMNGGRDVVFAPYGEYWRQMKSVCILNLLTNKMVESFEKVREDEVNAMIEKLEKASSSSSSENLSELFITLPSDVTSRVALGRKHSEDETARDLKKRVRQIMELLGEFPIGEYVPILAWIDGIRGFNNKIKEVSRGFSDLMDKVVQEHLEASNDKADFVDILLSIEKDKNSGFQVQRNDIKFMILDMFIGGTSTTSTLLEWTMTELIRSPKSMKKLQDEIRSTIRPHGSYIKEKEVENMKYLKAVIKEVLRLHPSLPMILPRLLSEDVKVKGYNIAAGTEVIINAWAIQRDTAIWGPDAEEFKPERHLDSGLDYHGKNLNYIPFGSGRRICPGINLALGLAEVTVANLVGRFDWRVEAGPNGDQPDLTEAIGIDVCRKFPLIAFPSSVV

SEQ ID NO: 158 - protein, 560 aa, Arabidopsis thaliana
MAHLQRTFPTEMSKGRASFPKGFLFGTASSSYQYEGAVNEGARGQSVWDHFSNRFPHRISDSSDGNVAVDFYHRYKEDIKRMKDINMDSFRLSIAWPRVLPYGKRDRGVSEEGIKFYNDVIDELLANEITPLVTIFHWDIPQDLEDEYGGFLSEQIIDDFRDYASLCFERFGDRVSLWCTMNEPWVYSVAGYDTGRKAPGRCSKYVNGASVAGMSGYEAYIVSHNMLLAHAEAVEVFRKCDHIKNGQIGIAHNPLWYEPYDPSDPDDVEGCNRAMDFMLGWHQHPTACGDYPETMKKSVGDRLPSFTPEQSKKLIGSCDYVGINYYSSLFVKSIKHVDPTQPTWRTDQGVDWMKTNIDGKQIAKQGGSEWSFTYPTGLRNILKYVKKTYGNPPILITENGYGEVAEQSQSLYMYNPSIDTERLEYIEGHIHAIHQAIHEDGVRVEGYYVWSLLDNFEWNSGYGVRYGLYYIDYKDGLRRYPKMSALWLKEFLRFDQEDDSSTSKKEEKKESYGKQLLHSVQDSQFVHSIKDSGALPAVLGSLFVVSATVGTSLFFKGANN

SEQ ID NO: 159 - protein, 346 aa, Arabidopsis thaliana
MSSTKDMSTVQNATPFNGVAPSTTVRVTIVQSSTVYNDTPATIDKAEKYIVEAASKGAELVLFPEGFIGGYPRGFRFGLAVGVHNEEGRDEFRKYHASAIHVPGPEVARLADVARKNHVYLVMGAIEKEGYTLYCTVLFFSPQGQFLGKHRKLMPTSLERCIWGQGDGSTIPVYDTPIGKLGAAICWENRMPLYRTALYAKGIELYCAPTADGSKEWQSSMLHIAIEGGCFVLSACQFCQRKHFPDHPDYLFTDWYDDKEHDSIVSQGGSVIISPLGQVLAGPNFESEGLVTADIDLGDIARAKLYFDSVGHYSRPDVLHLTVNEHPRKSVTFVTKVEKAEDDSNK

SEQ ID NO: 160 - protein, 403 aa, Homo sapiens [sequence omitted]

SEQ ID NO: 161 - protein, 406 aa, Homo sapiens
MSGCPFLGNNFGYTFKKLPVEGSEEDKSQTGVNRASKGGLIYGNYLHLEKVLNAQELQSETKGNKIHDEHLFIITHQAYELWFKQILWELDSVREIFQNGHVRDERNMLKVVSRMHRVSVILKLLVQQFSILETMTALDFNDFREYLSPASGFQSLQFRLLENKIGVLQNMRVPYNRRHYRDNFKGEENELLLKSEQEKTLLELVEAWLERTPGLEPHGFNFWGKLEKNITRGLEEEFIRIQAKEESEEKEEQVAEFQKQKEVLLSLFDEKRHEHLLSKGERRLSYRALQGALMIYFYREEPRFQVPFQLLTSLMDIDSLMTKWRYNHVCMVHRMLGSKAGTGGSSGYHYLRSTVSDRYKVFVDLFNLSTYLIPRHWIPKMNPTIHKFLYTAEYCDSSYFSSDESD

SEQ ID NO: 162 - protein, 453 aa, S. cerevisiae
MNNTSITGPQVLHRTKMRPLPVLEKYCISPHHGFLDDRLPLTRLSSKKYMKWEEIVADLPSLLQEDNKVRSVIDGLDVLDLDETILGDVRELRRAYSILGFMAHAYIWASGTPRDVLPECIARPLLETAHILGVPPLATYSSLVLWNFKVTDECKKTETGCLDLENITTINTFTGTVDESWFYLVSVRFEKIGSACLNHGLQILRAIRSGDKGDANVIDGLEGLAATIERLSKALMEMELKCEPNVFYFKIRPFLAGWTNMSHMGLPQGVRYGAEGQYRIFSGGSNAQSSLIQTLDILLGVKHTANAAHSSQGDSKINYLDEMKKYMPREHREFLYHLESVCNIREYVSRNASNRALQEAYGRCISMLKIFRDNHIQIVTKYIILPSNSKQHGSNKPNVLSPIEPNTKASGCLGHKVASSKTIGTGGTRLMPFLKQCRDETVATADIKNEDKN

SEQ ID NO: 163 - protein, 305 aa, mouse
MAFPSLSAGQNPWRNLSSEELEKQYSPSRWVIHTKPEEVVGNFVQIGSQATQKARATRRNQLDVPYGDGEGEKLDIYFPDEDSKAFPLFLFLHGGYWQSGSKDDSAFMVNPLTAQGIVVVIVAYDIAPKGTLDQMVDQVTRSVVFLQRRYPSNEGIYLCGHSAGAHLAAMVLLARWTKHGVTPNLQGFLLVSGIYDLEPLIATSQNDPLRMTLEDAQRNSPQRHLDVVPAQPVAPACPVLVLVGQHDSPEFHRQSKEFYETLLRVGWKASFQQLRGVDHFDIIENLTREDDVLTQIILKTVFQKL

SEQ ID NO: 164 - protein, 444 aa, S. cerevisae
MKQRFIRQFTNLMSTSRPKVVANKYFTSNTAKDVWSLTNEAAAKAANNSKNQGRELINLGQGFFSYSPPQFAIKEAQKALDIPMVNQYSPTRGRPSLINSLIKLYSPIYNTELKAENVTVTTGANEGILSCLMGLLNAGDEVIVFEPFFDQYIPNIELCGGKVVYVPINPPKELDQRNTRGEEWTIDFEQFEKAITSKTKAVIINTPHNPIGKVFTREELTTLGNICVKHNVVIISDEVYEHLYFTDSFTRIATLSPEIGQLTLTVGSAGKSFAATGWRIGWVLSLNAELLSYAAKAHTRICFASPSPLQEACANSINDALKIGYFEKMRQEYINKFKIFTSIFDELGLPYTAPEGTYFVLVDFSKVKIPEDYPYPEEILNKGKDFRISHWLINELGVVAIPPTEFYIKEHEKAAENLLRFAVCKDDAYLENAVERLKLLKDYL

SEQ ID NO: 165 - protein, 430 aa, Homo sapiens
MALLHSGRVLPGIAAAFHPGLAAAASARASSWWTHVEMGPPDPILGVTEAFKRDTNSKKMNLGVGAYRDDNGKPYVLPSVRKAEAQIAAKNLDKEYLPIGGLAEFCKASAELALGENSEVLKSGRFVTVQTISGTGALRIGASFLQRFFKFSRDVFLPKPTWGNHTPIFRDAGMQLQGYRYYDPKTCGFDFTGAVEDISKIPEQSVLLLHACAHNPTGVDPRPEQWKEIATVVKKRNLFAFFDMAYQGFASGDGDKDAWAVRHFIEQGINVCLCQSYAKNMGLYGERVGAFTMVCKDADEAKRVESQLKILIRPMYSNPPLNGARIAAAILNTPDLRKQWLQEVKVMADRIIGMRTQLVSNLKKEGSTHNWQHITDQIGMFCFTGLKPEQVERLIKEFSIYMTKDGRISVAGVTSSNVGYLAHAIHQVTK

SEQ ID NO: 166 - protein, 425 aa, Artificial Sequence
  Synthetic
MNYARFITAASAARNPSPIRTMTDILSRGPKSMISLAGGLPNPNMFPFKTAVITVENGKTIQFGEEMMKRALQYSPSAGIPELLSWLKQLQIKLHNPPTIHYPPSQGQMDLCVTSGSQQGLCKVFEMIINPGDNVLLDEPAYSGTLQSLHPLGCNIINVASDESGIVPDSLRDILSRWKPEDAKNPQKNTPKFLYTVPNGNNPTGNSLTSERKKEIYELARKYDFLIIEDDPYYFLQFNKFRVPTFLSMDVDGRVIRADSFSKIISSGLRIGFLTGPKPLIERVILHIQVSTLHPSTFNQLMISQLLHEWGEEGFMAHVDRVIDFYSNQKDAILAAADKWLTGLAEWHVPAAGMFLWIKVKGINDVKELIEEKAVKMGVLMLPGNAFYVDSSAPSPYLRASFSSASPEQMDVAFQVLAQLIKESL

SEQ ID NO: 167 - protein, 422 aa, Homo sapiens
MAKQLQARRLDGIDYNPWVEFVKLASEHDVVNLGQGFPDFPPPDFAVEAFQHAVSGDFMLNQYTKTFGYPPLTKILASFFGELLGQEIDPLRNVLVTVGGYGALFTAFQALVDEGDEVIIIEPFFDCYEPMTMMAGGRPVFVSLKPGPIQNGELGSSSNWQLDPMELAGKFTSRTKALVLNTPNNPLGKVFSREELELVASLCQQHDVVCITDEVYQWMVYDGHQHISIASLPGMWERTLTIGSAGKTFSATGWKVGWVLGPDHIMKHLRTVHQNSVFHCPTQSQAAVAESFEREQLLFRQPSSYFVQFPQAMQRCRDHMIRSLQSVGLKPIIPQGSYFLITDISDFKRKMPDLPGAVDEPYDRRFVKWMIKNKGLVAIPVSIFYSVPHQKHFDHYIRFCFVKDEATLQAMDEKLRKWKVEL

SEQ ID NO: 168 - protein, 454 aa, Homo sapiens
MFLAQRSLCSLSGRAKFLKTISSSKILGFSTSAKMSLKFTNAKRIEGLDSNVWIEFTKLAADPSVVNLGQGFPDISPPTYVKEELSKIAAIDSLNQYTRGFGHPSLVKALSYLYEKLYQKQIDSNKEILVTVGAYGSLFNTIQALIDEGDEVILIVPFYDCYEPMVRMAGATPVFIPLRSKPVYGKRWSSSDWTLDPQELESKFNSKTKAIILNTPHNPLGKVYNREELQVIADLCIKYDTLCISDEVYEWLVYSGNKHLKIATFPGMWERTITIGSAGKTFSVTGWKLGWSIGPNHLIKHLQTVQQNTIYTCATPLQEALAQAFWIDIKRMDDPECYFNSLPKELEVKRDRMVRLLESVGLKPIVPDGGYFIIADVSLLDPDLSDMKNNEPYDYKFVKWMTKHKKLSAIPVSAFCNSETKSQFEKFVRFCFIKKDSTLDAAEEIIKAWSVQKS

SEQ ID NO: 169 - protein, 444 aa, Cryptococcus deuterogattii R265
MTATTISIETVPQAPAAGTKTNGTSGKYNPRTYLSDRAKVTEIDGSDAGRPNPDTFPFNSITLNLKPPLGLPESSNNMPVSITIEDPDLATALQYAPSAGIPKLREWLADLQAHVHERPRGDYAISVGSGSQDLMFKGFQAVLNPGDPVLLETPMYSGVLPALRILKADYAEVDVDDQGLSAKNLEKVLSEWPADKKRPRVLYTSPIGSNPSGCSASKERKLEVLKVCKKYDVLIFEDDPYYYLAQELIPSYFALEKQVYPEGGHVVRFDSFSKLLSAGMRLGFATGPKEILHAIDVSTAGANLHTSAVSQGVALRLMQYWGIEGFLAHGRAVAKLYTERRAQFEATAHKYLDGLATWVSPVAGMFLWIDLRPAGIEDSYELIRHEALAKGVLGVPGMAFYPTGRKSSHVRVSFSIVDLEDESDLGFQRLAEAIKDKRKALGLA

SEQ ID NO: 170 - protein, 490 aa, Ruminococcus Gnavus
MSQVIKKKRNTFMIGTEYILNSTQLEEAIKSFVHDFCAEKHEIHDQPVVVEAKEHQEDKIKQIKIPEKGRPVNEVVSEMMNEVYRYRGDANHPRFFSFVPGPASSVSWLGDIMTSAYNIHAGGSKLAPMVNCIEQEVLKWLAKQVGFTENPGGVFVSGGSMANITALTAARDNKLTDINLHLGTAYISDQTHSSVAKGLRIIGITDSRIRRIPTNSHFQMDTTKLEEAIETDKKSGYIPFVVIGTAGTTNTGSIDPLTEISALCKKHDMWFHIDGAYGASVLLSPKYKSLLTGTGLADSISWDAHKWLFQTYGCAMVLVKDIRNLFHSFHVNPEYLKDLENDIDNVNTWDIGMELTRPARGLKLWLTLQVLGSDLIGSAIEHGFQLAVWAEEALNPKKDWEIVSPAQMAMINFRYAPKDLTKEEQDILNEKISHRILESGYAAIFTTVLNGKTVLRICAIHPEATQEDMQHTIDLLDQYGREIYTEMKKA

SEQ ID NO: 171 - DNA, 1332 bp, Cryptococcus deuterogattii R265
atgacggcaactacaatttctattgagaccgtacctcaggccccggcggcggggaccaaaactaatgggacttcaggaaaatacaacccccgcacttacctgtccgaccgcgccaaagtcactgagattgatggatctgacgccggtcgccccaatcccgatactttcccatttaactcgattaccttaaatttgaaaccacctttaggcttgcccgagagttcaaataacatgccggtctctatcacgattgaagaccccgatttagcgacggccttacaatatgcacctagcgccggtattcctaagctgcgcgaatggctggctgacttacaagctcacgttcatgagcgcccccgtggcgattatgccatctcggtcgggtcggggtcacaggatttgatgtttaagggcttccaagctgtcttgaatccaggtgatccagtccttctggaaaccccaatgtattcaggtgttctgccagcgctgcgcattctgaaggcggattatgcagaagttgatgtagacgaccaggggttatctgctaaaaaccttgaaaaagttttatcagagtggcccgcagataagaagcgtcctcgtgtcctgtatacgtcgccaatcggctccaatccttccggatgttcagcatccaaggaacgcaagttagaggtactgaaagtctgtaagaagtacgatgtgctgatcttcgaagacgatccgtattattaccttgctcaagagcttattccatcctattttgcgttggaaaaacaagtttatccggagggtgggcacgttgtacgctttgactcatttagtaaattgctttctgctgggatgcgcttgggatttgctacagggccgaaggaaattcttcatgcgattgacgtcagtacagcaggcgcaaatttacatacttcagcggtctctcaaggtgtcgctcttcgcctgatgcagtattgggggatcgagggattccttgcacatggccgcgcggtggccaaactttacacggagcgccgcgctcagttcgaggcaaccgcacataagtacctggacgggctggccacttgggtatctcccgtagcgggaatgtttttatggatcgatcttcgtccagcaggaatcgaagattcttacgaattaattcgccatgaagcattagccaaaggcgttttaggcgttccagggatggcgttttatccgacaggccgtaagtcttcccatgttcgtgtcagtttcagtatcgtcgacctggaagacgaatctgaccttggttttcaacgcctggctgaagctattaaggataaacgcaaggctttagggctggct

SEQ ID NO: 172 - DNA, 1470 bp, Ruminococcus Gnavus
atgagtcaagtgattaagaagaaacgtaacacctttatgatcggaacggagtacattcttaacagtacacaattggaggaagcgattaaatcattcgtacatgatttctgcgcagagaagcatgagatccatgatcaacctgtggtagtagaagctaaagaacatcaggaggacaaaatcaaacaaatcaaaatcccggaaaagggacgtcctgtaaatgaagtcgtttctgagatgatgaatgaagtgtatcgctaccgcggagacgccaaccatcctcgctttttttcttttgtgcccggacctgcaagcagtgtgtcgtggttgggggatattatgacgtccgcctacaatattcatgctggaggctcaaagctggcaccgatggttaactgcattgagcaggaagttctgaagtggttagcaaagcaagtggggttcacagaaaatccaggtggcgtatttgtgtcgggcggttcaatggcgaatattacggcacttactgcggctcgtgacaataaactgaccgacattaaccttcatttgggaactgcttatattagtgaccagactcatagttcagttgcgaaaggattacgcattattggaatcactgacagtcgcatccgtcgcattcccactaactcccacttccagatggataccaccaagctggaggaagccatcgagaccgacaagaagtctggctacattccgttcgtcgttatcggaacagcaggtaccaccaacactggttcgattgaccccctgacagaaatctctgcgttatgtaagaagcatgacatgtggtttcatatcgacggagcgtatggagctagtgttctgctgtcacctaagtacaagagccttcttaccggaaccggcttggctgacagtatttcgtgggatgctcataaatggttgttccaaacgtacggctgtgcaatggtacttgtcaaagatatccgtaatttattccactcttttcatgtgaatcccgagtatcttaaggatctggaaaacgacatcgataacgttaatacatgggacatcggcatggagctgacgcgccctgcacgcggtcttaaattgtggcttactttacaggtccttggatctgacttgattgggagtgccattgaacacggtttccagctggcagtttgggctgaggaagcattgaatccaaagaaagactgggagatcgtttctccagctcagatggctatgattaatttccgttatgcccctaaggatttaaccaaagaggaacaggatattctgaatgaaaagatctcccaccgcattttagagagcggatacgctgcaattttcactactgtattaaacggcaagaccgttttacgcatctgtgcaattcacccggaggcaactcaagaggatatgcaacacacaatcgacttattagaccaatacggtcgtgaaatctataccgagatgaagaaagcg

SEQ ID NO: 173 - protein, 412 aa, Clostridium sporogenes
MENNTNMFSGVKVIELANFIAAPAAGRFFADGGAEVIKIESPAGDPLRYTAPSEGRPLSQEENTTYDLENANKKAIVLNLKSEKGKKILHEMLAEADILLTNWRTKALVKQGLDYETLKEKYPKLVFAQITGYGEKGPDKDLPGFDYTAFFARGGVSGTLYEKGTVPPNVVPGLGDHQAGMFLAAGMAGALYKAKTTGQGDKVTVSLMHSAMYGLGIMIQAAQYKDHGLVYPINRNETPNPFIVSYKSKDDYFVQVCMPPYDVFYDRFMTALGREDLVGDERYNKIENLKDGRAKEVYSIIEQQMVTKTKDEWDKIFRDADIPFAIAQTWEDLLEDEQAWANDYLYKMKYPTGNERALVRLPVFFKEAGLPEYNQSPQIAENTVEVLKEMGYTEQEIEELEKDKDIMVRKEK

SEQ ID NO: 174 - protein, 407 aa, Clostridium sporogenes
MSDRNKEVKEKKAKHYLREITAKHYKEALEAKERGEKVGWCASNFPQEIATTLGVKVVYPENHAAAVAARGNGQNMCEHAEAMGFSNDVCGYARVNLAVMDIGHSEDQPIPMPDFVLCCNNICNQMIKWYEHIAKTLDIPMILIDIPYNTENTVSQDRIKYIRAQFDDAIKQLEEITGKKWDENKFEEVMKISQESAKQWLRAASYAKYKPSPFSGFDLFNHMAVAVCARGTQEAADAFKMLADEYEENVKTGKSTYRGEEKQRILFEGIACWPYLRHKLTKLSEYGMNVTATVYAEAFGVIYENMDELMAAYNKVPNSISFENALKMRLNAVTSTNTEGAVIHINRSCKLWSGFLYELARRLEKETGIPVVSFDGDQADPRNFSEAQYDTRIQGLNEVMVAKKEAE

SEQ ID NO: 175 - protein, 374 aa, Clostridium sporogenes
MSNSDKFFNDFKDIVENPKKYIMKHMEQTGQKAIGCMPLYTPEELVLAAGMFPVGVWGSNTELSKAKTYFPAFICSILQTTLENALNGEYDMLSGMMITNYCDSLKCMGQNFKLTVENIEFIPVTVPQNRKMEAGKEFLKSQYKMNIEQLEKISGNKITDESLEKAIEIYDEHRKVMNDFSMLASKYPGIITPTKRNYVMKSAYYMDKKEHTEKVRQLMDEIKAIEPKPFEGKRVITTGIIADSEDLLKILEENNIAIVGDDIAHESRQYRTLTPEANTPMDRLAEQFANRECSTLYDPEKKRGQYIVEMAKERKADGIIFFMTKFCDPEEYDYPQMKKDFEEAGIPHVLIETDMQMKNYEQARTAIQAFSETL

SEQ ID NO: 176 - protein, 377 aa, Clostridium sporogenes
MFFTEQHELIRKLARDFAEQEIEPIADEVDKTAEFPKEIVKKMAQNGFFGIKMPKEYGGAGADNRAYVTIMEEISRASGVAGIYLSSPNSLLGTPFLLVGTDEQKEKYLKPMIRGEKTLAFALTEPGAGSDAGALATTAREEGDYYILNGRKTFITGAPISDNIIVFAKTDMSKGTKGITTFIVDSKQEGVSFGKPEDKMGMIGCPTSDIILENVKVHKSDILGEVNKGFITAMKTLSVGRIGVASQALGIAQAAVDEAVKYAKQRKQFNRPIAKFQAIQFKLANMETKLNAAKLLVYNAAYKMDCGEKADKEASMAKYFAAESAIQIVNDALQIHGGYGYIKDYKIERLYRDVRVIAIYEGTSEVQQMVIASNLLK

SEQ ID NO: 177 - protein, 331 aa, Clostridium sporogenes
MKILAYCVRPDEVDSFKKFSEKYGHTVDLIPDSFGPNVAHLAKGYDGISILGNDTCNREALEKIKDCGIKYLATRTAGVNNIDFDAAKEFGINVANVPAYSPNSVSEFTIGLALSLTRKIPFALKRVELNNFALGGLIGVELRNLTLGVIGTGRIGLKVIEGFSGFGMKKMIGYDIFENEEAKKYIEYKSLDEVFKEADIITLHAPLTDDNYHMIGKESIAKMKDGVFIINAARGALIDSEALIEGLKSGKIAGAALDSYEYEQGVFHNNKMNEIMQDDTLERLKSFPNVVITPHLGFYTDEAVSNMVEITLMNLQEFELKGTCKNQRVCK

SEQ ID NO: 178 - protein, 334 aa, Clostridium sporogenes
MKILMYSVREHEKPAIKKWLEANPGVQIDLCNNALSEDTVCKAKEYDGIAIQQTNSIGGKAVYSTLKEYGIKQIASRTAGVDMIDLKMASDSNILVTNVPAYSPNAIAELAVTHTMNLLRNIKTLNKRIAYGDYRWSADLIAREVRSVTVGVVGTGKIGRTSAKLFKGLGANVIGYDAYPDKKLEENNLLTYKESLEDLLREADVVTLHTPLLESTKYMINKNNLKYMKPDAFIVNTGRGGIINTEDLIEALEQNKIAGAALDTFENEGLFLNKVVDPTKLPDSQLDKLLKMDQVLITHHVGFFTTTAVQNIVDTSLDSVVEVLKTNNSVNKVN

SEQ ID NO: 179 - protein, 326 aa, Rhodobacter sphaeroides; identical to SEQ ID NO: 42

SEQ ID NO: 180 - DNA, 290 bp, Artificial Sequence
  Synthetic
gtcagcataacaccctgacctctcattaattgttcatgccgggcggcactatcgtcgtccggccttttcctctcttactctgctacgtacatctatttctataaatccgttcaatttgtctgttttttgcacaaacatgaaatatcagacaattccgtgacttaagaaaatttatacaaatcagcaatataccccttaaggagtatataaaggtgaatttgatttacatcaataagcggggttgctgaatcgttaaggtaggcggtaatagaaaagaaatcgaggcaaaa

SEQ ID NO: 181 - DNA, 173 bp, Artificial Sequence
  Synthetic
atttcctctcatcccatccggggtgagagtcttttcccccgacttatggctcatgcatgcatcaaaaaagatgtgagcttgatcaaaaacaaaaaatatttcactcgacaggagtatttatattgcgcccgttacgtgggcttcgactgtaaatcagaaaggagaaaacacct

SEQ ID NO: 182 - DNA, 305 bp, Artificial Sequence
  Synthetic
gtcagcataacaccctgacctctcattaattgttcatgccgggcggcactatcgtcgtccggccttttcctctcttactctgctacgtacatctatttctataaatccgttcaatttgtctgttttttgcacaaacatgaaatatcagacaattccgtgacttaagaaaatttatacaaatcagcaatataccccttaaggagtatataaaggtgaatttgatttacatcaataagcggggttgctgaatcgttaaggatccctctagaaataattttgtttaactttaagaaggagatatacat

SEQ ID NO: 183 - DNA, 180 bp, Artificial Sequence
  Synthetic
catttcctctcatcccatccggggtgagagtcttttcccccgacttatggctcatgcatgcatcaaaaaagatgtgagcttgatcaaaaacaaaaaatatttcactcgacaggagtatttatattgcgcccggatccctctagaaataattttgtttaactttaagaaggagatatacat

SEQ ID NO: 184 - DNA, 199 bp, Artificial Sequence
  Synthetic
agttgttcttattggtggtgttgctttatggttgcatcgtagtaaatggttgtaacaaaagcaatttttccggctgtctgtatacaaaaacgccgtaaagtttgagcgaagtcaataaactctctacccattcagggcaatatctctcttggatccctctagaaataattttgtttaactttaagaaggagatatacat

SEQ ID NO: 185 - DNA, 117 bp, Artificial Sequence
  Synthetic
atccccatcactcttgatggagatcaattccccaagctgctagagcgttaccttgcccttaaacattagcaatgtcgatttatcagagggccgacaggctcccacaggagaaaaccg

SEQ ID NO: 186 - DNA, 108 bp, Artificial Sequence
  Synthetic
ctcttgatcgttatcaattcccacgctgtttcagagcgttaccttgcccttaaacattagcaatgtcgatttatcagagggccgacaggctcccacaggagaaaaccg

SEQ ID NO: 187 - DNA, 290 bp, Artificial Sequence; identical to SEQ ID NO: 180
  Synthetic

SEQ ID NO: 188 - DNA, 433 bp, Artificial Sequence
  Synthetic
cggcccgatcgttgaacatagcggtccgcaggcggcactgcttacagcaaacggtctgtacgctgtcgtctttgtgatgtgcttcctgttaggtttcgtcagccgtcaccgtcagcataacaccctgacctctcattaattgctcatgccggacggcactatcgtcgtccggccttttcctctcttcccccgctacgtgcatctatttctataaacccgctcattttgtctattttttgcacaaacatgaaatatcagacaattccgtgacttaagaaaatttatacaaatcagcaatatacccattaaggagtatataaaggtgaatttgatttacatcaataagcggggttgctgaatcgttaaggtaggcggtaatagaaaagaaatcgaggcaaaaatgtttgtttaactttaagaaggagatatacat

SEQ ID NO: 189 - DNA, 290 bp, Artificial Sequence
  Synthetic
gtcagcataacaccctgacctctcattaattgctcatgccggacggcactatcgtcgtccggccttttcctctcttcccccgctacgtgcatctatttctataaacccgctcattttgtctattttttgcacaaacatgaaatatcagacaattccgtgacttaagaaaatttatacaaatcagcaatatacccattaaggagtatataaaggtgaatttgatttacatcaataagcggggttgctgaatcgttaaggtaggcggtaatagaaaagaaatcgaggcaaaa

SEQ ID NO: 190 - DNA, 173 bp, Artificial Sequence; identical to SEQ ID NO: 181
  Synthetic

SEQ ID NO: 191 - DNA, 305 bp, Artificial Sequence; identical to SEQ ID NO: 182
  Synthetic

SEQ ID NO: 192 - DNA, 180 bp, Artificial Sequence; identical to SEQ ID NO: 183
  Synthetic

SEQ ID NO: 193 - DNA, 199 bp, Artificial Sequence; identical to SEQ ID NO: 184
  Synthetic

SEQ ID NO: 194 - DNA, 207 bp, Artificial Sequence
  Synthetic
agttgttcttattggtggtgttgctttatggttgcatcgtagtaaatggttgtaacaaaagcaatttttccggctgtctgtatacaaaaacgccgcaaagtttgagcgaagtcaataaactctctacccattcagggcaatatctctcttggatccaaagtgaactctagaaataattttgtttaactttaagaaggagatatacat

SEQ ID NO: 195 - DNA, 390 bp, Artificial Sequence
  Synthetic
tcgtctttgtgatgtgcttcctgttaggtttcgtcagccgtcaccgtcagcataacaccctgacctctcattaattgctcatgccggacggcactatcgtcgtccggccttttcctctcttcccccgctacgtgcatctatttctataaacccgctcattttgtctattttttgcacaaacatgaaatatcagacaattccgtgacttaagaaaatttatacaaatcagcaatatacccattaaggagtatataaaggtgaatttgatttacatcaataagcggggttgctgaatcgttaaggtagaaatgtgatctagttcacatttgcggtaatagaaaagaaatcgaggcaaaaatgtttgtttaactttaagaaggagatatacat

SEQ ID NO: 196 - DNA, 200 bp, Artificial Sequence
  Synthetic
agttgttcttattggtggtgttgctttatggttgcatcgtagtaaatggttgtaacaaaagcaatttttccggctgtctgtatacaaaaacgccgcaaagtttgagcgaagtcaataaactctctacccattcagggcaatatctctcaaatgtgatctagttcacattttttgtttaactttaagaaggagatatacat

SEQ ID NO: 197 - DNA, 355 bp, Artificial Sequence
  Synthetic
tgtggcttttatgaaaatcacacagtgatcacaaattttaaacagagcacaaaatgctgcctcgaaatgagggcgggaaaataaggttatcagccttgttttctccctcattacttgaaggatatgaagctaaaacccttttttataaagcatttgtccgaattcggacataatcaaaaaagcttaattaagatcaatttgatctacatctctttaaccaacaatatgtaagatctcaactatcgcatccgtggattaattcaattataacttctctctaacgctgtgtatcgtaacggtaacactgtagaggggagcacattgatgcgaattcattaaagaggagaaaggtacc

SEQ ID NO: 198 - DNA, 228 bp, Artificial Sequence
  Synthetic
ttccgaaaattcctggcgagcagataaataagaattgttcttatcaatatatctaactcattgaatctttattagttttgtttttcacgcttgttaccactattagtgtgataggaacagccagaatagcggaacacatagccggtgctatacttaatctcgttaattactgggacataacatcaagaggatatgaaattcgaattcattaaagaggagaaaggtacc

SEQ ID NO: 199 - DNA, 334 bp, Artificial Sequence
  Synthetic
gcttagatcaggtgattgccctttgtttatgagggtgttgtaatccatgtcgttgttgcatttgtaagggcaacacctcagcctgcaggcaggcactgaagataccaaagggtagttcagattacacggtcacctggaaagggggccattttactttttatcgccgctggcggtgcaaagttcacaaagttgtcttacgaaggttgtaaggtaaaacttatcgatttgataatggaaacgcattagccgaatcggcaaaaattggttaccttacatctcatcgaaaacacggaggaagtatagatgcgaattcattaaagaggagaaaggtacc

SEQ ID NO: 200 - DNA, 134 bp, Artificial Sequence
  Synthetic
ctcgagttcattatccatcctccatcgccacgatagttcatggcgataggtagaatagcaatgaacgattatccctatcaagcattctgactgataattgctcacacgaattcattaaagaggagaaaggtacc

SEQ ID NO: 201 - DNA, 1921 bp, Artificial Sequence
  Synthetic
ttacccgtctggattttcagtacgcgcttttaaacgacgccacagcgtggtacggctgatccccaaataacgtgcggcggcgcgcttatcgccattaaagcgtgcgagcacctcctgcaatggaagcgcttctgctgacgagggcgtgatttctgctgtggtccccaccagttcaggtaataattgccgcataaattgtctgtccagtgttggtgcgggatcgacgcttaaaaaaagcgccaggcgttccatcatattccgcagttcgcgaatattaccgggccaatgatagttcagtagaagcggctgacactgcgtcagcccatgacgcaccgattcggtaaaagggatctccatcgcggccagcgattgttttaaaaagttttccgccagaggcagaatatcaggctgtcgctcgcgcaaggggggaagcggcagacgcagaatgctcaaacggtaaaacagatcggtacgaaaacgtccttgcgttatctcccgatccagatcgcaatgcgtggcgctgatcacccggacatctaccgggatcggctgatgcccgccaacgcgggtgacggctttttcctccagtacgcgtagaaggcgggtttgtaacggcagcggcatttcgccaatttcgtcaagaaacagcgtgccgccgtgggcgacctcaaacagccccgcacgtccacctcgtcttgagccggtaaacgctccctcctcatagccaaacagttcagcctccagcaacgactcggtaatcgcgccgcaattaacggcgacaaagggcggagaaggcttgttctgacggtggggctgacggttaaacaacgcctgatgaatcgcttgcgccgccagctctttcccggtccctgtttccccctgaatcagcactgccgcgcgggaacgggcatagagtgtaatcgtatggcgaacctgctccatttgtggtgaatcgccgaggatatcgctcagcgcataacgggtctgtaatcccttgctggaggtatgctggctatactgacgccgtgtcaggcgggtcatatccagcgcatcatggaaagcctgacgtacggtggccgctgaataaataaagatggcggtcattcctgcctcttccgccaggtcggtaattagtcctgccccaattacagcctcaatgccgttagctttgagctcgttaatttgcccgcgagcatcctcttcagtgatatagcttcgctgttcaagacggaggtgaaacgttttctgaaaggcgaccagagccggaatggtctcctgataggtcacgattcccattgaggaagtcagctttcccgcttttgccagagcctgtaatacatcgaatccgctgggtttgatgaggatgacaggtaccgacagtcggctttttaaataagcgccgttggaacctgccgcgataatcgcgtcgcagcgttcggttgccagttttttgcgaatgtaggctactgccttttcaaaaccgagctgaataggcgtgatcgtcgccagatgatcaaactccaggctgatatcccgaaatagttcgaacaggcgcgttaccgagaccgtccagatcaccggtttatcgctattatcgcgcgaagcgctatgcacagtaaccatcgtcgtagattcatgtttaaggaacgaattcttgttttatagatgtttcgttaatgttgcaatgaaacacaggcctccgtttcatgaaacgttagctgactcgtttttcttgtgactcgtctgtcagtattaaaaaagatttttcatttaactgattgtttttaaattgaattttatttaatggtttctcggtttttgggtctggcatatcccttgctttaatgagtgcatcttaattaacaattcaataacaagagggctgaatagtaatttcaacaaaataacgagcattcgaatg

SEQ ID NO: 202 - DNA, 305 bp, Artificial Sequence
  Synthetic
cagacattgccgtcactgcgtcttttactggctcttctcgctaacccaaccggtaaccccgcttattaaaagcattctgtaacaaagcgggaccaaagccatgacaaaaacgcgtaacaaaagtgtctataatcacggcagaaaagtccacattgattatttgcacggcgtcacactttgctatgccatagcatttttatccataagattagcggatccagcctgacgctttttttcgcaactctctactgtttctccatacctctagaaataattttgtttaactttaagaaggagatatacat

SEQ ID NO: 203 - DNA, 897 bp, Artificial Sequence
  Synthetic
ttattcacaacctgccctaaactcgctcggactcgccccggtgcattttttaaatactcgcgagaaatagagttgatcgtcaaaaccgacattgcgaccgacggtggcgataggcatccgggtggtgctcaaaagcagcttcgcctgactgatgcgctggtcctcgcgccagcttaatacgctaatccctaactgctggcggaacaaatgcgacagacgcgacggcgacaggcagacatgctgtgcgacgctggcgatatcaaaattactgtctgccaggtgatcgctgatgtactgacaagcctcgcgtacccgattatccatcggtggatggagcgactcgttaatcgcttccatgcgccgcagtaacaattgctcaagcagatttatcgccagcaattccgaatagcgcccttccccttgtccggcattaatgatttgcccaaacaggtcgctgaaatgcggctggtgcgcttcatccgggcgaaagaaaccggtattggcaaatatcgacggccagttaagccattcatgccagtaggcgcgcggacgaaagtaaacccactggtgataccattcgtgagcctccggatgacgaccgtagtgatgaatctctccaggcgggaacagcaaaatatcacccggtcggcagacaaattctcgtccctgatttttcaccaccccctgaccgcgaatggtgagattgagaatataacctttcattcccagcggtcggtcgataaaaaaatcgagataaccgttggcctcaatcggcgttaaacccgccaccagatgggcgttaaacgagtatcccggcagcaggggatcattttgcgcttcagccatacttttcatactcccgccattcagagaagaaaccaattgtccatattgcat

SEQ ID NO: 204 - protein, 298 aa, Artificial Sequence
  Synthetic
MQYGQLVSSLNGGSMKSMAEAQNDPLLPGYSFNAHLVAGLTPIEANGYLDFFIDRPLGMKGYILNLTIRGQGVVKNQGREFVCRPGDILLFPPGEIHHYGRHPEAHEWYHQWVYFRPRAYWHEWLNWPSIFANTGFFRPDEAHQPHFSDLFGQIINAGQGEGRYSELLAINLLEQLLLRRMEAINESLHPPMDNRVREACQYISDHLADSNFDIASVAQHVCLSPSRLSHLFRQQLGISVLSWREDQRISQAKLLLSTTRMPIATVGRNVGFDDQLYFSRVFKKCTGASPSEFRAGCE

SEQ ID NO: 205 - DNA, 280 bp, Artificial Sequence
  Synthetic
cggtgagcatcacatcaccacaattcagcaaattgtgaacatcatcacgttcatctttccctggttgccaatggcccattttcctgtcagtaacgagaaggtcgcgaatcaggcgctttttagactggtcgtaatgaaattcagctgtcaccggatgtgctttccggtctgatgagtccgtgaggacgaaacagcctctacaaataattttgtttaaaacaacacccactaagataactctagaaataattttgtttaactttaagaaggagatatacat

SEQ ID NO: 206 - DNA, 326 bp, Artificial Sequence
  Synthetic
attcaccaccctgaattgactctcttccgggcgctatcatgccataccgcgaaaggttttgcgccattcgatggcgcgccgcttcgtcaggccacatagctttcttgttctgatcggaacgatcgttggctgtgttgacaattaatcatcggctcgtataatgtgtggaattgtgagcgctcacaattagctgtcaccggatgtgctttccggtctgatgagtccgtgaggacgaaacagcctctacaaataattttgtttaaaacaacacccactaagataactctagaaataattttgtttaactttaagaaggagatatacat

SEQ ID NO: 207 - DNA, 1083 bp, Artificial Sequence
  Synthetic
tcactgcccgctttccagtcgggaaacctgtcgtgccagctgcattaatgaatcggccaacgcgcggggagaggcggtttgcgtattgggcgccagggtggtttttcttttcaccagtgagactggcaacagctgattgcccttcaccgcctggccctgagagagttgcagcaagcggtccacgctggtttgccccagcaggcgaaaatcctgtttgatggtggttaacggcgggatataacatgagctatcttcggtatcgtcgtatcccactaccgagatatccgcaccaacgcgcagcccggactcggtaatggcgcgcattgcgcccagcgccatctgatcgttggcaaccagcatcgcagtgggaacgatgccctcattcagcatttgcatggtttgttgaaaaccggacatggcactccagtcgccttcccgttccgctatcggctgaatttgattgcgagtgagatatttatgccagccagccagacgcagacgcgccgagacagaacttaatgggcccgctaacagcgcgatttgctggtgacccaatgcgaccagatgctccacgcccagtcgcgtaccgtcctcatgggagaaaataatactgttgatgggtgtctggtcagagacatcaagaaataacgccggaacattagtgcaggcagcttccacagcaatggcatcctggtcatccagcggatagttaatgatcagcccactgacgcgttgcgcgagaagattgtgcaccgccgctttacaggcttcgacgccgcttcgttctaccatcgacaccaccacgctggcacccagttgatcggcgcgagatttaatcgccgcgacaatttgcgacggcgcgtgcagggccagactggaggtggcaacgccaatcagcaacgactgtttgcccgccagttgttgtgccacgcggttgggaatgtaattcagctccgccatcgccgcttccactttttcccgcgttttcgcagaaacgtggctggcctggttcaccacgcgggaaacggtctgataagagacaccggcatactctgcgacatcgtataacgttactggtttcat

SEQ ID NO: 208 - protein, 360 aa, Artificial Sequence
  Synthetic
MKPVTLYDVAEYAGVSYQTVSRVVNQASHVSAKTREKVEAAMAELNYIPNRVAQQLAGKQSLLIGVATSSLALHAPSQIVAAIKSRADQLGASVVVSMVERSGVEACKAAVHNLLAQRVSGLIINYPLDDQDAIAVEAACTNVPALFLDVSDQTPINSIIFSHEDGTRLGVEHLVALGHQQIALLAGPLSSVSARLRLAGWHKYLTRNQIQPIAEREGDWSAMSGFQQTMQMLNEGIVPTAMLVANDQMALGAMRAITESGLRVGADISVVGYDDTEDSSCYIPPLTTIKQDFRLLGQTSVDRLLQLSQGQAVKGNQLLPVSLVKRKTTLAPNTQTASPRALADSLMQLARQVSRLESGQ

SEQ ID NO: 209 - DNA, 222 bp, Artificial Sequence
  Synthetic
acgttaaatctatcaccgcaagggataaatatctaacaccgtgcgtgttgactattttacctctggcggtgataatggttgcatagctgtcaccggatgtgctttccggtctgatgagtccgtgaggacgaaacagcctctacaaataattttgtttaaaacaacacccactaagataactctagaaataattttgtttaactttaagaaggagatatacat

SEQ ID NO: 210 - DNA, 714 bp, Artificial Sequence
  Synthetic
tcagccaaacgtctcttcaggccactgactagcgataactttccccacaacggaacaactctcattgcatgggatcattgggtactgtgggtttagtggttgtaaaaacacctgaccgctatccctgatcagtttcttgaaggtaaactcatcacccccaagtctggctatgcagaaatcacctggctcaacagcctgctcagggtcaacgagaattaacattccgtcaggaaagcttggcttggagcctgttggtgcggtcatggaattaccttcaacctcaagccagaatgcagaatcactggcttttttggttgtgcttacccatctctccgcatcacctttggtaaaggttctaagcttaggtgagaacatccctgcctgaacatgagaaaaaacagggtactcatactcacttctaagtgacggctgcatactaaccgcttcatacatctcgtagatttctctggcgattgaagggctaaattcttcaacgctaactttgagaatttttgtaagcaatgcggcgttataagcatttaatgcattgatgccattaaataaagcaccaacgcctgactgccccatccccatcttgtctgcgacagattcctgggataagccaagttcatttttctttttttcataaattgctttaaggcgacgtgcgtcctcaagctgctcttgtgttaatggtttcttttttgtgctcat

SEQ ID NO: 211 - DNA, 43 bp, Artificial Sequence
  Synthetic
ctctagaaataattttgtttaactttaagaaggagatatacat

SEQ ID NO: 212 - protein, 237 aa, Artificial Sequence
  Synthetic
MSTKKKPLTQEQLEDARRLKAIYEKKKNELGLSQESVADKMGMGQSGVGALFNGINALNAYNAALLTKILKVSVEEFSPSIAREIYEMYEAVSMQPSLRSEYEYPVFSHVQAGMFSPKLRTFTKGDAERWVSTTKKASDSAFWLEVEGNSMTAPTGSKPSFPDGMLILVDPEQAVEPGDFCIARLGGDEFTFKKLIRDSGQVFLQPLNPQYPMIPCNESCSVVGKVIASQWPEETFG

SEQ ID NO: 213 - DNA, 748 bp, Artificial Sequence
  Synthetic
ttaagacccactttcacatttaagttgtttttctaatccgcatatgatcaattcaaggccgaataagaaggctggctctgcaccttggtgatcaaataattcgatagcttgtcgtaataatggcggcatactatcagtagtaggtgtttccctttcttctttagcgacttgatgctcttgatcttccaatacgcaacctaaagtaaaatgccccacagcgctgagtgcatataatgcattctctagtgaaaaaccttgttggcataaaaaggctaattgattttcgagagtttcatactgtttttctgtaggccgtgtacctaaatgtacttttgctccatcgcgatgacttagtaaagcacatctaaaacttttagcgttattacgtaaaaaatcttgccagctttccccttctaaagggcaaaagtgagtatggtgcctatctaacatctcaatggctaaggcgtcgagcaaagcccgcttattttttacatgccaatacaatgtaggctgctctacacctagcttctgggcgagtttacgggttgttaaaccttcgattccgacctcattaagcagctctaatgcgctgttaatcactttacttttatctaatctagacatcattaattcctaatttttgttgacactctatcattgatagagttattttaccactccctatcagtgatagagaaaagtgaactctagaaataattttgtttaactttaagaaggagatatacat

SEQ ID NO: 214 - DNA, 225 bp, Artificial Sequence
  Synthetic
tcacctttcccggattaaacgcttttttgcccggtggcatggtgctaccggcgatcacaaacggttaattatgacacaaattgacctgaatgaatatacagtattggaatgcattacccggagtgttgtgtaacaatgtctggccaggtttgtttcccggaaccgaggtcacaacatagtaaaagcgctattggtaatggtacaatcgcgcgtttacacttattc

SEQ ID NO: 215 - DNA, 60 bp, Artificial Sequence
  Synthetic
tagaactgatgcaaaaagtgctcgacgaaggcacacagatgtgtaggctggagctgcttc

SEQ ID NO: 216 - DNA, 60 bp, Artificial Sequence
  Synthetic
gtttcgtaattagatagccaccggcgctttaatgcccggacatatgaatatcctccttag

SEQ ID NO: 217 - DNA, 52 bp, Artificial Sequence
  Synthetic
caacacgtttcctgaggaaccatgaaacagtatttagaactgatgcaaaaag

SEQ ID NO: 218 - DNA, 46 bp, Artificial Sequence
  Synthetic
cgcacactggcgtcggctctggcaggatgtttcgtaattagatagc

SEQ ID NO: 219 - DNA, 36 bp, Artificial Sequence
  Synthetic
atatcgtcgcagcccacagcaacacgtttcctgagg

SEQ ID NO: 220 - DNA, 47 bp, Artificial Sequence
  Synthetic
aagaatttaacggagggcaaaaaaaaccgacgcacactggcgtcggc

SEQ ID NO: 221 - DNA, 8575 bp, Artificial Sequence
  Synthetic
ttattatcgcaccgcaatcgggattttcgattcataaagcaggtcgtaggtcggcttgttgagcaggtcttgcagcgtgaaaccgtccagatacgtgaaaaacgacttcattgcaccgccgagtatgcccgtcagccggcaggacggcgtaatcaggcattcgttgttcgggcccatacactcgaccagctgcatcggttcgaggtggcggacgaccgcgccgatattgatgcgttcgggcggcgcggccagcctcagcccgccgcctttcccgcgtacgctgtgcaagaacccgcctttgaccagcgcggtaaccactttcatcaaatggcttttggaaatgccgtaggtcgaggcgatggtggcgatattgaccagcgcgtcgtcgttgacggcggtgtagatgaggacgcgcagcccgtagtcggtatgttgggtcagatacatacaacctccttagtacatgcaaaattatttctagagcaacatacgagccggaagcataaagtgtaaagcctggggtgcctaatgagttgagttgaggaattataacaggaagaaatattcctcatacgcttgtaattcctctatggttgttgacaattaatcatcggctcgtataatgtataacattcatattttgtgaattttaaactctagaaataattttgtttaactttaagaaggagatatacatatggatttaaattctaaaaaatatcagatgcttaaagagctatatgtaagcttcgctgaaaatgaagttaaacctttagcaacagaacttgatgaagaagaaagatttccttatgaaacagtggaaaaaatggcaaaagcaggaatgatgggtataccatatccaaaagaatatggtggagaaggtggagacactgtaggatatataatggcagttgaagaattgtctagagtttgtggtactacaggagttatattatcagctcatacatctcttggctcatggcctatatatcaatatggtaatgaagaacaaaaacaaaaattcttaagaccactagcaagtggagaaaaattaggagcatttggtcttactgagcctaatgctggtacagatgcgtctggccaacaaacaactgctgttttagacggggatgaatacatacttaatggctcaaaaatatttataacaaacgcaatagctggtgacatatatgtagtaatggcaatgactgataaatctaaggggaacaaaggaatatcagcatttatagttgaaaaaggaactcctgggtttagctttggagttaaagaaaagaaaatgggtataagaggttcagctacgagtgaattaatatttgaggattgcagaatacctaaagaaaatttacttggaaaagaaggtcaaggatttaagatagcaatgtctactcttgatggtggtagaattggtatagctgcacaagctttaggtttagcacaaggtgctcttgatgaaactgttaaatatgtaaaagaaagagtacaatttggtagaccattatcaaaattccaaaatacacaattccaattagctgatatggaagttaaggtacaagcggctagacaccttgtatatcaagcagctataaataaagacttaggaaaaccttatggagtagaagcagcaatggcaaaattatttgcagctgaaacagctatggaagttactacaaaagctgtacaacttcatggaggatatggatacactcgtgactatccagtagaaagaatgatgagagatgctaagataactgaaatatatgaaggaactagtgaagttcaaagaatggttatttcaggaaaactattaaaatagtaagaaggagatatacatatggaggaaggatttatgaatatagtcgtttgtataaaacaagttccagatacaacagaagttaaactagatcctaatacaggtactttaattagagatggagtaccaagtataataaaccctgatgataaagcaggtttagaagaagctataaaattaaaagaagaaatgggtgctcatgtaactgttataacaatgggacctcctcaagcagatatggctttaaaagaagctttagcaatgggtgcagatagaggtatattattaacagatagagcatttgcgggtgctgatacttgggcaacttcatcagcattagcaggagcattaaaaaatatagattttgatattataatagctggaagacaggcgatagatggagatactgcacaagttggacctcaaatagctgaacatttaaatcttccatcaataacatatgctgaagaaataaaaactgaaggtgaatatgtattagtaaaaagacaatttgaagattgttgccatgacttaaaagttaaaatgccatgccttataacaactcttaaagatatgaacacaccaagatacatgaaagttggaagaatatatgatgctttcgaaaatgatgtagtagaaacatggactgtaaaagatatagaagttgacccttctaatttaggtcttaaaggttctccaactagtgtatttaaatcatttacaaaatcagttaaaccagctggtacaatatacaatgaagatgcgaaaacatcagctggaattatcatagataaattaaaagagaagtatatcatataataagaaggagatatacatatgggtaacgttttagtagtaatagaacaaagagaaaatgtaattcaaactgtttctttagaattactaggaaaggctacagaaatagcaaaagattatgatacaaaagtttctgcattacttttaggtagtaaggtagaaggtttaatagatacattagcacactatggtgcagatgaggtaatagtagtagatgatgaagctttagcagtgtatacaactgaaccatatacaaaagcagcttatgaagcaataaaagcagctgaccctatagttgtattatttggtgcaacttcaataggtagagatttagcgcctagagtttctgctagaatacatacaggtcttactgctgactgtacaggtcttgcagtagctgaagatacaaaattattattaatgacaagacctgcctttggtggaaatataatggcaacaatagtttgtaaagatttcagacctcaaatgtctacagttagaccaggggttatgaagaaaaatgaacctgatgaaactaaagaagctgtaattaaccgtttcaaggtagaatttaatgatgctgataaattagttcaagttgtacaagtaataaaagaagctaaaaaacaagttaaaatagaagatgctaagatattagtttctgctggacgtggaatgggtggaaaagaaaacttagacatactttatgaattagctgaaattataggtggagaagtttctggttctcgtgccactatagatgcaggttggttagataaagcaagacaagttggtcaaactggtaaaactgtaagaccagacctttatatagcatgtggtatatctggagcaatacaacatatagctggtatggaagatgctgagtttatagttgctataaataaaaatccagaagctccaatatttaaatatgctgatgttggtatagttggagatgttcataaagtgcttccagaacttatcagtcagttaagtgttgcaaaagaaaaaggtgaagttttagctaactaataagaaggagatatacatatgagagaagtagtaattgccagtgcagctagaacagcagtaggaagttttggaggagcatttaaatcagtttcagcggtagagttaggggtaacagcagctaaagaagctataaaaagagctaacataactccagatatgatagatgaatctcttttagggggagtacttacagcaggtcttggacaaaatatagcaagacaaatagcattaggagcaggaataccagtagaaaaaccagctatgactataaatatagtttgtggttctggattaagatctgtttcaatggcatctcaacttatagcattaggtgatgctgatataatgttagttggtggagctgaaaacatgagtatgtctccttatttagtaccaagtgcgagatatggtgcaagaatgggtgatgctgcttttgttgattcaatgataaaagatggattatcagacatatttaataactatcacatgggtattactgctgaaaacatagcagagcaatggaatataactagagaagaacaagatgaattagctcttgcaagtcaaaataaagctgaaaaagctcaagctgaaggaaaatttgatgaagaaatagttcctgttgttataaaaggaagaaaaggtgacactgtagtagataaagatgaatatattaagcctggcactacaatggagaaacttgctaagttaagacctgcatttaaaaaagatggaacagttactgctggtaatgcatcaggaataaatgatggtgctgctatgttagtagtaatggctaaagaaaaagctgaagaactaggaatagagcctcttgcaactatagtttcttatggaacagctggtgttgaccctaaaataatgggatatggaccagttccagcaactaaaaaagctttagaagctgctaatatgactattgaagatatagatttagttgaagctaatgaggcatttgctgcccaatctgtagctgtaataagagacttaaatatagatatgaataaagttaatgttaatggtggagcaatagctataggacatccaataggatgctcaggagcaagaatacttactacacttttatatgaaatgaagagaagagatgctaaaactggtcttgctacactttgtataggcggtggaatgggaactactttaatagttaagagatagtaagaaggagatatacatatgaaattagctgtaataggtagtggaactatgggaagtggtattgtacaaacttttgcaagttgtggacatgatgtatgtttaaagagtagaactcaaggtgctatagataaatgtttagctttattagataaaaatttaactaagttagttactaagggaaaaatggatgaagctacaaaagcagaaatattaagtcatgttagttcaactactaattatgaagatttaaaagatatggatttaataatagaagcatctgtagaagacatgaatataaagaaagatgttttcaagttactagatgaattatgtaaagaagatactatcttggcaacaaatacttcatcattatctataacagaaatagcttcttctactaagcgcccagataaagttataggaatgcatttctttaatccagttcctatgatgaaattagttgaagttataagtggtcagttaacatcaaaagttacttttgatacagtatttgaattatctaagagtatcaataaagtaccagtagatgtatctgaatctcctggatttgtagtaaatagaatacttatacctatgataaatgaagctgttggtatatatgcagatggtgttgcaagtaaagaagaaatagatgaagctatgaaattaggagcaaaccatccaatgggaccactagcattaggtgatttaatcggattagatgttgttttagctataatgaacgttttatatactgaatttggagatactaaatatagacctcatccacttttagctaaaatggttagagctaatcaattaggaagaaaaactaagataggattctatgattataataaataataagaaggagatatacatatgagtacaagtgatgttaaagtttatgagaatgtagctgttgaagtagatggaaatatatgtacagtgaaaatgaatagacctaaagcccttaatgcaataaattcaaagactttagaagaactttatgaagtatttgtagatattaataatgatgaaactattgatgttgtaatattgacaggggaaggaaaggcatttgtagctggagcagatattgcatacatgaaagatttagatgctgtagctgctaaagattttagtatcttaggagcaaaagcttttggagaaatagaaaatagtaaaaaagtagtgatagctgctgtaaacggatttgctttaggtggaggatgtgaacttgcaatggcatgtgatataagaattgcatctgctaaagctaaatttggtcagccagaagtaactcttggaataactccaggatatggaggaactcaaaggcttacaagattggttggaatggcaaaagcaaaagaattaatctttacaggtcaagttataaaagctgatgaagctgaaaaaatagggctagtaaatagagtcgttgagccagacattttaatagaagaagttgagaaattagctaagataatagctaaaaatgctcagcttgcagttagatactctaaagaagcaatacaacttggtgctcaaactgatataaatactggaatagatatagaatctaatttatttggtctttgtttttcaactaaagaccaaaaagaaggaatgtcagctttcgttgaaaagagagaagctaactttataaaagggtaataagaaggagatatacatatgagaagttttgaagaagtaattaagtttgcaaaagaaagaggacctaaaactatatcagtagcatgttgccaagataaagaagttttaatggcagttgaaatggctagaaaagaaaaaatagcaaatgccattttagtaggagatatagaaaagactaaagaaattgcaaaaagcatagacatggatatcgaaaattatgaactgatagatataaaagatttagcagaagcatctctaaaatctgttgaattagtttcacaaggaaaagccgacatggtaatgaaaggcttagtagacacatcaataatactaaaagcagttttaaataaagaagtaggtcttagaactggaaatgtattaagtcacgtagcagtatttgatgtagagggatatgatagattatttttcgtaactgacgcagctatgaacttagctcctgatacaaatactaaaaagcaaatcatagaaaatgcttgcacagtagcacattcattagatataagtgaaccaaaagttgctgcaatatgcgcaaaagaaaaagtaaatccaaaaatgaaagatacagttgaagctaaagaactagaagaaatgtatgaaagaggagaaatcaaaggttgtatggttggtgggccttttgcaattgataatgcagtatctttagaagcagctaaacataaaggtataaatcatcctgtagcaggacgagctgatatattattagccccagatattgaaggtggtaacatattatataaagctttggtattcttctcaaaatcaaaaaatgcaggagttatagttggggctaaagcaccaataatattaacttctagagcagacagtgaagaaactaaactaaactcaatagctttaggtgttttaatggcagcaaaggcataataagaaggagatatacatatgagcaaaatatttaaaatcttaacaataaatcctggttcgacatcaactaaaatagctgtatttgataatgaggatttagtatttgaaaaaactttaagacattcttcagaagaaataggaaaatatgagaaggtgtctgaccaatttgaatttcgtaaacaagtaatagaagaagctctaaaagaaggtggagtaaaaacatctgaattagatgctgtagtaggtagaggaggacttcttaaacctataaaaggtggtacttattcagtaagtgctgctatgattgaagatttaaaagtgggagttttaggagaacacgcttcaaacctaggtggaataatagcaaaacaaataggtgaagaagtaaatgttccttcatacatagtagaccctgttgttgtagatgaattagaagatgttgctagaatttctggtatgcctgaaataagtagagcaagtgtagtacatgctttaaatcaaaaggcaatagcaagaagatatgctagagaaataaacaagaaatatgaagatataaatcttatagttgcacacatgggtggaggagtttctgttggagctcataaaaatggtaaaatagtagatgttgcaaacgcattagatggagaaggacctttctctccagaaagaagtggtggactaccagtaggtgcattagtaaaaatgtgctttagtggaaaatatactcaagatgaaattaaaaagaaaataaaaggtaatggcggactagttgcatacttaaacactaatgatgctagagaagttgaagaaagaattgaagctggtgatgaaaaagctaaattagtatatgaagctatggcatatcaaatctctaaagaaataggagctagtgctgcagttcttaagggagatgtaaaagcaatattattaactggtggaatcgcatattcaaaaatgtttacagaaatgattgcagatagagttaaatttatagcagatgtaaaagtttatccaggtgaagatgaaatgattgcattagctcaaggtggacttagagttttaactggtgaagaagaggctcaagtttatgataactaataa

SEQ ID NO: 222 - DNA, 6787 bp, Artificial Sequence
  Synthetic
ttattatcgcaccgcaatcgggattttcgattcataaagcaggtcgtaggtcggcttgttgagcaggtcttgcagcgtgaaaccgtccagatacgtgaaaaacgacttcattgcaccgccgagtatgcccgtcagccggcaggacggcgtaatcaggcattcgttgttcgggcccatacactcgaccagctgcatcggttcgaggtggcggacgaccgcgccgatattgatgcgttcgggcggcgcggccagcctcagcccgccgcctttcccgcgtacgctgtgcaagaacccgcctttgaccagcgcggtaaccactttcatcaaatggcttttggaaatgccgtaggtcgaggcgatggtggcgatattgaccagcgcgtcgtcgttgacggcggtgtagatgaggacgcgcagcccgtagtcggtatgttgggtcagatacatacaacctccttagtacatgcaaaattatttctagagcaacatacgagccggaagcataaagtgtaaagcctggggtgcctaatgagttgagttgaggaattataacaggaagaaatattcctcatacgcttgtaattcctctatggttgttgacaattaatcatcggctcgtataatgtataacattcatattttgtgaattttaaactctagaaataattttgtttaactttaagaaggagatatacatatgatcgtaaaacctatggtacgcaacaatatctgcctgaacgcccatcctcagggctgcaagaagggagtggaagatcagattgaatataccaagaaacgcattaccgcagaagtcaaagctggcgcaaaagctccaaaaaacgttctggtgcttggctgctcaaatggttacggcctggcgagccgcattactgctgcgttcggatacggggctgcgaccatcggcgtgtcctttgaaaaagcgggttcagaaaccaaatatggtacaccgggatggtacaataatttggcatttgatgaagcggcaaaacgcgagggtctttatagcgtgacgatcgacggcgatgcgttttcagacgagatcaaggcccaggtaattgaggaagccaaaaaaaaaggtatcaaatttgatctgatcgtatacagcttggccagcccagtacgtactgatcctgatacaggtatcatgcacaaaagcgttttgaaaccctttggaaaaacgttcacaggcaaaacagtagatccgtttactggcgagctgaaggaaatctccgcggaaccagcaaatgacgaggaagcagccgccactgttaaagttatggggggtgaagattgggaacgttggattaagcagctgtcgaaggaaggcctcttagaagaaggctgtattaccttggcctatagttatattggccctgaagctacccaagctttgtaccgtaaaggcacaatcggcaaggccaaagaacacctggaggccacagcacaccgtctcaacaaagagaacccgtcaatccgtgccttcgtgagcgtgaataaaggcctggtaacccgcgcaagcgccgtaatcccggtaatccctctgtatctcgccagcttgttcaaagtaatgaaagagaagggcaatcatgaaggttgtattgaacagatcacgcgtctgtacgccgagcgcctgtaccgtaaagatggtacaattccagttgatgaggaaaatcgcattcgcattgatgattgggagttagaagaagacgtccagaaagcggtatccgcgttgatggagaaagtcacgggtgaaaacgcagaatctctcactgacttagcggggtaccgccatgatttcttagctagtaacggctttgatgtagaaggtattaattatgaagcggaagttgaacgcttcgaccgtatctgataagaaggagatatacatatgagagaagtagtaattgccagtgcagctagaacagcagtaggaagttttggaggagcatttaaatcagtttcagcggtagagttaggggtaacagcagctaaagaagctataaaaagagctaacataactccagatatgatagatgaatctcttttagggggagtacttacagcaggtcttggacaaaatatagcaagacaaatagcattaggagcaggaataccagtagaaaaaccagctatgactataaatatagtttgtggttctggattaagatctgtttcaatggcatctcaacttatagcattaggtgatgctgatataatgttagttggtggagctgaaaacatgagtatgtctccttatttagtaccaagtgcgagatatggtgcaagaatgggtgatgctgcttttgttgattcaatgataaaagatggattatcagacatatttaataactatcacatgggtattactgctgaaaacatagcagagcaatggaatataactagagaagaacaagatgaattagctcttgcaagtcaaaataaagctgaaaaagctcaagctgaaggaaaatttgatgaagaaatagttcctgttgttataaaaggaagaaaaggtgacactgtagtagataaagatgaatatattaagcctggcactacaatggagaaacttgctaagttaagacctgcatttaaaaaagatggaacagttactgctggtaatgcatcaggaataaatgatggtgctgctatgttagtagtaatggctaaagaaaaagctgaagaactaggaatagagcctcttgcaactatagtttcttatggaacagctggtgttgaccctaaaataatgggatatggaccagttccagcaactaaaaaagctttagaagctgctaatatgactattgaagatatagatttagttgaagctaatgaggcatttgctgcccaatctgtagctgtaataagagacttaaatatagatatgaataaagttaatgttaatggtggagcaatagctataggacatccaataggatgctcaggagcaagaatacttactacacttttatatgaaatgaagagaagagatgctaaaactggtcttgctacactttgtataggcggtggaatgggaactactttaatagttaagagatagtaagaaggagatatacatatgaaattagctgtaataggtagtggaactatgggaagtggtattgtacaaacttttgcaagttgtggacatgatgtatgtttaaagagtagaactcaaggtgctatagataaatgtttagctttattagataaaaatttaactaagttagttactaagggaaaaatggatgaagctacaaaagcagaaatattaagtcatgttagttcaactactaattatgaagatttaaaagatatggatttaataatagaagcatctgtagaagacatgaatataaagaaagatgttttcaagttactagatgaattatgtaaagaagatactatcttggcaacaaatacttcatcattatctataacagaaatagcttcttctactaagcgcccagataaagttataggaatgcatttctttaatccagttcctatgatgaaattagttgaagttataagtggtcagttaacatcaaaagttacttttgatacagtatttgaattatctaagagtatcaataaagtaccagtagatgtatctgaatctcctggatttgtagtaaatagaatacttatacctatgataaatgaagctgttggtatatatgcagatggtgttgcaagtaaagaagaaatagatgaagctatgaaattaggagcaaaccatccaatgggaccactagcattaggtgatttaatcggattagatgttgttttagctataatgaacgttttatatactgaatttggagatactaaatatagacctcatccacttttagctaaaatggttagagctaatcaattaggaagaaaaactaagataggattctatgattataataaataataagaaggagatatacatatgagtacaagtgatgttaaagtttatgagaatgtagctgttgaagtagatggaaatatatgtacagtgaaaatgaatagacctaaagcccttaatgcaataaattcaaagactttagaagaactttatgaagtatttgtagatattaataatgatgaaactattgatgttgtaatattgacaggggaaggaaaggcatttgtagctggagcagatattgcatacatgaaagatttagatgctgtagctgctaaagattttagtatcttaggagcaaaagcttttggagaaatagaaaatagtaaaaaagtagtgatagctgctgtaaacggatttgctttaggtggaggatgtgaacttgcaatggcatgtgatataagaattgcatctgctaaagctaaatttggtcagccagaagtaactcttggaataactccaggatatggaggaactcaaaggcttacaagattggttggaatggcaaaagcaaaagaattaatctttacaggtcaagttataaaagctgatgaagctgaaaaaatagggctagtaaatagagtcgttgagccagacattttaatagaagaagttgagaaattagctaagataatagctaaaaatgctcagcttgcagttagatactctaaagaagcaatacaacttggtgctcaaactgatataaatactggaatagatatagaatctaatttatttggtctttgtttttcaactaaagaccaaaaagaaggaatgtcagctttcgttgaaaagagagaagctaactttataaaagggtaataagaaggagatatacatatgagaagttttgaagaagtaattaagtttgcaaaagaaagaggacctaaaactatatcagtagcatgttgccaagataaagaagttttaatggcagttgaaatggctagaaaagaaaaaatagcaaatgccattttagtaggagatatagaaaagactaaagaaattgcaaaaagcatagacatggatatcgaaaattatgaactgatagatataaaagatttagcagaagcatctctaaaatctgttgaattagtttcacaaggaaaagccgacatggtaatgaaaggcttagtagacacatcaataatactaaaagcagttttaaataaagaagtaggtcttagaactggaaatgtattaagtcacgtagcagtatttgatgtagagggatatgatagattatttttcgtaactgacgcagctatgaacttagctcctgatacaaatactaaaaagcaaatcatagaaaatgcttgcacagtagcacattcattagatataagtgaaccaaaagttgctgcaatatgcgcaaaagaaaaagtaaatccaaaaatgaaagatacagttgaagctaaagaactagaagaaatgtatgaaagaggagaaatcaaaggttgtatggttggtgggccttttgcaattgataatgcagtatctttagaagcagctaaacataaaggtataaatcatcctgtagcaggacgagctgatatattattagccccagatattgaaggtggtaacatattatataaagctttggtattcttctcaaaatcaaaaaatgcaggagttatagttggggctaaagcaccaataatattaacttctagagcagacagtgaagaaactaaactaaactcaatagctttaggtgttttaatggcagcaaaggcataataagaaggagatatacatatgagcaaaatatttaaaatcttaacaataaatcctggttcgacatcaactaaaatagctgtatttgataatgaggatttagtatttgaaaaaactttaagacattcttcagaagaaataggaaaatatgagaaggtgtctgaccaatttgaatttcgtaaacaagtaatagaagaagctctaaaagaaggtggagtaaaaacatctgaattagatgctgtagtaggtagaggaggacttcttaaacctataaaaggtggtacttattcagtaagtgctgctatgattgaagatttaaaagtgggagttttaggagaacacgcttcaaacctaggtggaataatagcaaaacaaataggtgaagaagtaaatgttccttcatacatagtagaccctgttgttgtagatgaattagaagatgttgctagaatttctggtatgcctgaaataagtagagcaagtgtagtacatgctttaaatcaaaaggcaatagcaagaagatatgctagagaaataaacaagaaatatgaagatataaatcttatagttgcacacatgggtggaggagtttctgttggagctcataaaaatggtaaaatagtagatgttgcaaacgcattagatggagaaggacctttctctccagaaagaagtggtggactaccagtaggtgcattagtaaaaatgtgctttagtggaaaatatactcaagatgaaattaaaaagaaaataaaaggtaatggcggactagttgcatacttaaacactaatgatgctagagaagttgaagaaagaattgaagctggtgatgaaaaagctaaattagtatatgaagctatggcatatcaaatctctaaagaaataggagctagtgctgcagttcttaagggagatgtaaaagcaatattattaactggtggaatcgcatattcaaaaatgtttacagaaatgattgcagatagagttaaatttatagcagatgtaaaagtttatccaggtgaagatgaaatgattgcattagctcaaggtggacttagagttttaactggtgaagaagaggctcaagtttatgataactaataa

SEQ ID NO: 223 - DNA, 8012 bp, Artificial Sequence
  Synthetic
ctcgagttcattatccatcctccatcgccacgatagttcatggcgataggtagaatagcaatgaacgattatccctatcaagcattctgactgataattgctcacacgaattcattaaagaggagaaaggtaccatggatttaaattctaaaaaatatcagatgcttaaagagctatatgtaagcttcgctgaaaatgaagttaaacctttagcaacagaacttgatgaagaagaaagatttccttatgaaacagtggaaaaaatggcaaaagcaggaatgatgggtataccatatccaaaagaatatggtggagaaggtggagacactgtaggatatataatggcagttgaagaattgtctagagtttgtggtactacaggagttatattatcagctcatacatctcttggctcatggcctatatatcaatatggtaatgaagaacaaaaacaaaaattcttaagaccactagcaagtggagaaaaattaggagcatttggtcttactgagcctaatgctggtacagatgcgtctggccaacaaacaactgctgttttagacggggatgaatacatacttaatggctcaaaaatatttataacaaacgcaatagctggtgacatatatgtagtaatggcaatgactgataaatctaaggggaacaaaggaatatcagcatttatagttgaaaaaggaactcctgggtttagctttggagttaaagaaaagaaaatgggtataagaggttcagctacgagtgaattaatatttgaggattgcagaatacctaaagaaaatttacttggaaaagaaggtcaaggatttaagatagcaatgtctactcttgatggtggtagaattggtatagctgcacaagctttaggtttagcacaaggtgctcttgatgaaactgttaaatatgtaaaagaaagagtacaatttggtagaccattatcaaaattccaaaatacacaattccaattagctgatatggaagttaaggtacaagcggctagacaccttgtatatcaagcagctataaataaagacttaggaaaaccttatggagtagaagcagcaatggcaaaattatttgcagctgaaacagctatggaagttactacaaaagctgtacaacttcatggaggatatggatacactcgtgactatccagtagaaagaatgatgagagatgctaagataactgaaatatatgaaggaactagtgaagttcaaagaatggttatttcaggaaaactattaaaatagtaagaaggagatatacatatggaggaaggatttatgaatatagtcgtttgtataaaacaagttccagatacaacagaagttaaactagatcctaatacaggtactttaattagagatggagtaccaagtataataaaccctgatgataaagcaggtttagaagaagctataaaattaaaagaagaaatgggtgctcatgtaactgttataacaatgggacctcctcaagcagatatggctttaaaagaagctttagcaatgggtgcagatagaggtatattattaacagatagagcatttgcgggtgctgatacttgggcaacttcatcagcattagcaggagcattaaaaaatatagattttgatattataatagctggaagacaggcgatagatggagatactgcacaagttggacctcaaatagctgaacatttaaatcttccatcaataacatatgctgaagaaataaaaactgaaggtgaatatgtattagtaaaaagacaatttgaagattgttgccatgacttaaaagttaaaatgccatgccttataacaactcttaaagatatgaacacaccaagatacatgaaagttggaagaatatatgatgctttcgaaaatgatgtagtagaaacatggactgtaaaagatatagaagttgacccttctaatttaggtcttaaaggttctccaactagtgtatttaaatcatttacaaaatcagttaaaccagctggtacaatatacaatgaagatgcgaaaacatcagctggaattatcatagataaattaaaagagaagtatatcatataataagaaggagatatacatatgggtaacgttttagtagtaatagaacaaagagaaaatgtaattcaaactgtttctttagaattactaggaaaggctacagaaatagcaaaagattatgatacaaaagtttctgcattacttttaggtagtaaggtagaaggtttaatagatacattagcacactatggtgcagatgaggtaatagtagtagatgatgaagctttagcagtgtatacaactgaaccatatacaaaagcagcttatgaagcaataaaagcagctgaccctatagttgtattatttggtgcaacttcaataggtagagatttagcgcctagagtttctgctagaatacatacaggtcttactgctgactgtacaggtcttgcagtagctgaagatacaaaattattattaatgacaagacctgcctttggtggaaatataatggcaacaatagtttgtaaagatttcagacctcaaatgtctacagttagaccaggggttatgaagaaaaatgaacctgatgaaactaaagaagctgtaattaaccgtttcaaggtagaatttaatgatgctgataaattagttcaagttgtacaagtaataaaagaagctaaaaaacaagttaaaatagaagatgctaagatattagtttctgctggacgtggaatgggtggaaaagaaaacttagacatactttatgaattagctgaaattataggtggagaagtttctggttctcgtgccactatagatgcaggttggttagataaagcaagacaagttggtcaaactggtaaaactgtaagaccagacctttatatagcatgtggtatatctggagcaatacaacatatagctggtatggaagatgctgagtttatagttgctataaataaaaatccagaagctccaatatttaaatatgctgatgttggtatagttggagatgttcataaagtgcttccagaacttatcagtcagttaagtgttgcaaaagaaaaaggtgaagttttagctaactaataagaaggagatatacatatgagagaagtagtaattgccagtgcagctagaacagcagtaggaagttttggaggagcatttaaatcagtttcagcggtagagttaggggtaacagcagctaaagaagctataaaaagagctaacataactccagatatgatagatgaatctcttttagggggagtacttacagcaggtcttggacaaaatatagcaagacaaatagcattaggagcaggaataccagtagaaaaaccagctatgactataaatatagtttgtggttctggattaagatctgtttcaatggcatctcaacttatagcattaggtgatgctgatataatgttagttggtggagctgaaaacatgagtatgtctccttatttagtaccaagtgcgagatatggtgcaagaatgggtgatgctgcttttgttgattcaatgataaaagatggattatcagacatatttaataactatcacatgggtattactgctgaaaacatagcagagcaatggaatataactagagaagaacaagatgaattagctcttgcaagtcaaaataaagctgaaaaagctcaagctgaaggaaaatttgatgaagaaatagttcctgttgttataaaaggaagaaaaggtgacactgtagtagataaagatgaatatattaagcctggcactacaatggagaaacttgctaagttaagacctgcatttaaaaaagatggaacagttactgctggtaatgcatcaggaataaatgatggtgctgctatgttagtagtaatggctaaagaaaaagctgaagaactaggaatagagcctcttgcaactatagtttcttatggaacagctggtgttgaccctaaaataatgggatatggaccagttccagcaactaaaaaagctttagaagctgctaatatgactattgaagatatagatttagttgaagctaatgaggcatttgctgcccaatctgtagctgtaataagagacttaaatatagatatgaataaagttaatgttaatggtggagcaatagctataggacatccaataggatgctcaggagcaagaatacttactacacttttatatgaaatgaagagaagagatgctaaaactggtcttgctacactttgtataggcggtggaatgggaactactttaatagttaagagatagtaagaaggagatatacatatgaaattagctgtaataggtagtggaactatgggaagtggtattgtacaaacttttgcaagttgtggacatgatgtatgtttaaagagtagaactcaaggtgctatagataaatgtttagctttattagataaaaatttaactaagttagttactaagggaaaaatggatgaagctacaaaagcagaaatattaagtcatgttagttcaactactaattatgaagatttaaaagatatggatttaataatagaagcatctgtagaagacatgaatataaagaaagatgttttcaagttactagatgaattatgtaaagaagatactatcttggcaacaaatacttcatcattatctataacagaaatagcttcttctactaagcgcccagataaagttataggaatgcatttctttaatccagttcctatgatgaaattagttgaagttataagtggtcagttaacatcaaaagttacttttgatacagtatttgaattatctaagagtatcaataaagtaccagtagatgtatctgaatctcctggatttgtagtaaatagaatacttatacctatgataaatgaagctgttggtatatatgcagatggtgttgcaagtaaagaagaaatagatgaagctatgaaattaggagcaaaccatccaatgggaccactagcattaggtgatttaatcggattagatgttgttttagctataatgaacgttttatatactgaatttggagatactaaatatagacctcatccacttttagctaaaatggttagagctaatcaattaggaagaaaaactaagataggattctatgattataataaataataagaaggagatatacatatgagtacaagtgatgttaaagtttatgagaatgtagctgttgaagtagatggaaatatatgtacagtgaaaatgaatagacctaaagcccttaatgcaataaattcaaagactttagaagaactttatgaagtatttgtagatattaataatgatgaaactattgatgttgtaatattgacaggggaaggaaaggcatttgtagctggagcagatattgcatacatgaaagatttagatgctgtagctgctaaagattttagtatcttaggagcaaaagcttttggagaaatagaaaatagtaaaaaagtagtgatagctgctgtaaacggatttgctttaggtggaggatgtgaacttgcaatggcatgtgatataagaattgcatctgctaaagctaaatttggtcagccagaagtaactcttggaataactccaggatatggaggaactcaaaggcttacaagattggttggaatggcaaaagcaaaagaattaatctttacaggtcaagttataaaagctgatgaagctgaaaaaatagggctagtaaatagagtcgttgagccagacattttaatagaagaagttgagaaattagctaagataatagctaaaaatgctcagcttgcagttagatactctaaagaagcaatacaacttggtgctcaaactgatataaatactggaatagatatagaatctaatttatttggtctttgtttttcaactaaagaccaaaaagaaggaatgtcagctttcgttgaaaagagagaagctaactttataaaagggtaataagaaggagatatacatatgagaagttttgaagaagtaattaagtttgcaaaagaaagaggacctaaaactatatcagtagcatgttgccaagataaagaagttttaatggcagttgaaatggctagaaaagaaaaaatagcaaatgccattttagtaggagatatagaaaagactaaagaaattgcaaaaagcatagacatggatatcgaaaattatgaactgatagatataaaagatttagcagaagcatctctaaaatctgttgaattagtttcacaaggaaaagccgacatggtaatgaaaggcttagtagacacatcaataatactaaaagcagttttaaataaagaagtaggtcttagaactggaaatgtattaagtcacgtagcagtatttgatgtagagggatatgatagattatttttcgtaactgacgcagctatgaacttagctcctgatacaaatactaaaaagcaaatcatagaaaatgcttgcacagtagcacattcattagatataagtgaaccaaaagttgctgcaatatgcgcaaaagaaaaagtaaatccaaaaatgaaagatacagttgaagctaaagaactagaagaaatgtatgaaagaggagaaatcaaaggttgtatggttggtgggccttttgcaattgataatgcagtatctttagaagcagctaaacataaaggtataaatcatcctgtagcaggacgagctgatatattattagccccagatattgaaggtggtaacatattatataaagctttggtattcttctcaaaatcaaaaaatgcaggagttatagttggggctaaagcaccaataatattaacttctagagcagacagtgaagaaactaaactaaactcaatagctttaggtgttttaatggcagcaaaggcataataagaaggagatatacatatgagcaaaatatttaaaatcttaacaataaatcctggttcgacatcaactaaaatagctgtatttgataatgaggatttagtatttgaaaaaactttaagacattcttcagaagaaataggaaaatatgagaaggtgtctgaccaatttgaatttcgtaaacaagtaatagaagaagctctaaaagaaggtggagtaaaaacatctgaattagatgctgtagtaggtagaggaggacttcttaaacctataaaaggtggtacttattcagtaagtgctgctatgattgaagatttaaaagtgggagttttaggagaacacgcttcaaacctaggtggaataatagcaaaacaaataggtgaagaagtaaatgttccttcatacatagtagaccctgttgttgtagatgaattagaagatgttgctagaatttctggtatgcctgaaataagtagagcaagtgtagtacatgctttaaatcaaaaggcaatagcaagaagatatgctagagaaataaacaagaaatatgaagatataaatcttatagttgcacacatgggtggaggagtttctgttggagctcataaaaatggtaaaatagtagatgttgcaaacgcattagatggagaaggacctttctctccagaaagaagtggtggactaccagtaggtgcattagtaaaaatgtgctttagtggaaaatatactcaagatgaaattaaaaagaaaataaaaggtaatggcggactagttgcatacttaaacactaatgatgctagagaagttgaagaaagaattgaagctggtgatgaaaaagctaaattagtatatgaagctatggcatatcaaatctctaaagaaataggagctagtgctgcagttcttaagggagatgtaaaagcaatattattaactggtggaatcgcatattcaaaaatgtttacagaaatgattgcagatagagttaaatttatagcagatgtaaaagtttatccaggtgaagatgaaatgattgcattagctcaaggtggacttagagttttaactggtgaagaagaggctcaagtttatgataactaataa

SEQ ID NO: 224 - DNA, 6224 bp, Artificial Sequence
  Synthetic
ctcgagttcattatccatcctccatcgccacgatagttcatggcgataggtagaatagcaatgaacgattatccctatcaagcattctgactgataattgctcacacgaattcattaaagaggagaaaggtaccatgatcgtaaaacctatggtacgcaacaatatctgcctgaacgcccatcctcagggctgcaagaagggagtggaagatcagattgaatataccaagaaacgcattaccgcagaagtcaaagctggcgcaaaagctccaaaaaacgttctggtgcttggctgctcaaatggttacggcctggcgagccgcattactgctgcgttcggatacggggctgcgaccatcggcgtgtcctttgaaaaagcgggttcagaaaccaaatatggtacaccgggatggtacaataatttggcatttgatgaagcggcaaaacgcgagggtctttatagcgtgacgatcgacggcgatgcgttttcagacgagatcaaggcccaggtaattgaggaagccaaaaaaaaaggtatcaaatttgatctgatcgtatacagcttggccagcccagtacgtactgatcctgatacaggtatcatgcacaaaagcgttttgaaaccctttggaaaaacgttcacaggcaaaacagtagatccgtttactggcgagctgaaggaaatctccgcggaaccagcaaatgacgaggaagcagccgccactgttaaagttatggggggtgaagattgggaacgttggattaagcagctgtcgaaggaaggcctcttagaagaaggctgtattaccttggcctatagttatattggccctgaagctacccaagctttgtaccgtaaaggcacaatcggcaaggccaaagaacacctggaggccacagcacaccgtctcaacaaagagaacccgtcaatccgtgccttcgtgagcgtgaataaaggcctggtaacccgcgcaagcgccgtaatcccggtaatccctctgtatctcgccagcttgttcaaagtaatgaaagagaagggcaatcatgaaggttgtattgaacagatcacgcgtctgtacgccgagcgcctgtaccgtaaagatggtacaattccagttgatgaggaaaatcgcattcgcattgatgattgggagttagaagaagacgtccagaaagcggtatccgcgttgatggagaaagtcacgggtgaaaacgcagaatctctcactgacttagcggggtaccgccatgatttcttagctagtaacggctttgatgtagaaggtattaattatgaagcggaagttgaacgcttcgaccgtatctgataagaaggagatatacatatgagagaagtagtaattgccagtgcagctagaacagcagtaggaagttttggaggagcatttaaatcagtttcagcggtagagttaggggtaacagcagctaaagaagctataaaaagagctaacataactccagatatgatagatgaatctcttttagggggagtacttacagcaggtcttggacaaaatatagcaagacaaatagcattaggagcaggaataccagtagaaaaaccagctatgactataaatatagtttgtggttctggattaagatctgtttcaatggcatctcaacttatagcattaggtgatgctgatataatgttagttggtggagctgaaaacatgagtatgtctccttatttagtaccaagtgcgagatatggtgcaagaatgggtgatgctgcttttgttgattcaatgataaaagatggattatcagacatatttaataactatcacatgggtattactgctgaaaacatagcagagcaatggaatataactagagaagaacaagatgaattagctcttgcaagtcaaaataaagctgaaaaagctcaagctgaaggaaaatttgatgaagaaatagttcctgttgttataaaaggaagaaaaggtgacactgtagtagataaagatgaatatattaagcctggcactacaatggagaaacttgctaagttaagacctgcatttaaaaaagatggaacagttactgctggtaatgcatcaggaataaatgatggtgctgctatgttagtagtaatggctaaagaaaaagctgaagaactaggaatagagcctcttgcaactatagtttcttatggaacagctggtgttgaccctaaaataatgggatatggaccagttccagcaactaaaaaagctttagaagctgctaatatgactattgaagatatagatttagttgaagctaatgaggcatttgctgcccaatctgtagctgtaataagagacttaaatatagatatgaataaagttaatgttaatggtggagcaatagctataggacatccaataggatgctcaggagcaagaatacttactacacttttatatgaaatgaagagaagagatgctaaaactggtcttgctacactttgtataggcggtggaatgggaactactttaatagttaagagatagtaagaaggagatatacatatgaaattagctgtaataggtagtggaactatgggaagtggtattgtacaaacttttgcaagttgtggacatgatgtatgtttaaagagtagaactcaaggtgctatagataaatgtttagctttattagataaaaatttaactaagttagttactaagggaaaaatggatgaagctacaaaagcagaaatattaagtcatgttagttcaactactaattatgaagatttaaaagatatggatttaataatagaagcatctgtagaagacatgaatataaagaaagatgttttcaagttactagatgaattatgtaaagaagatactatcttggcaacaaatacttcatcattatctataacagaaatagcttcttctactaagcgcccagataaagttataggaatgcatttctttaatccagttcctatgatgaaattagttgaagttataagtggtcagttaacatcaaaagttacttttgatacagtatttgaattatctaagagtatcaataaagtaccagtagatgtatctgaatctcctggatttgtagtaaatagaatacttatacctatgataaatgaagctgttggtatatatgcagatggtgttgcaagtaaagaagaaatagatgaagctatgaaattaggagcaaaccatccaatgggaccactagcattaggtgatttaatcggattagatgttgttttagctataatgaacgttttatatactgaatttggagatactaaatatagacctcatccacttttagctaaaatggttagagctaatcaattaggaagaaaaactaagataggattctatgattataataaataataagaaggagatatacatatgagtacaagtgatgttaaagtttatgagaatgtagctgttgaagtagatggaaatatatgtacagtgaaaatgaatagacctaaagcccttaatgcaataaattcaaagactttagaagaactttatgaagtatttgtagatattaataatgatgaaactattgatgttgtaatattgacaggggaaggaaaggcatttgtagctggagcagatattgcatacatgaaagatttagatgctgtagctgctaaagattttagtatcttaggagcaaaagcttttggagaaatagaaaatagtaaaaaagtagtgatagctgctgtaaacggatttgctttaggtggaggatgtgaacttgcaatggcatgtgatataagaattgcatctgctaaagctaaatttggtcagccagaagtaactcttggaataactccaggatatggaggaactcaaaggcttacaagattggttggaatggcaaaagcaaaagaattaatctttacaggtcaagttataaaagctgatgaagctgaaaaaatagggctagtaaatagagtcgttgagccagacattttaatagaagaagttgagaaattagctaagataatagctaaaaatgctcagcttgcagttagatactctaaagaagcaatacaacttggtgctcaaactgatataaatactggaatagatatagaatctaatttatttggtctttgtttttcaactaaagaccaaaaagaaggaatgtcagctttcgttgaaaagagagaagctaactttataaaagggtaataagaaggagatatacatatgagaagttttgaagaagtaattaagtttgcaaaagaaagaggacctaaaactatatcagtagcatgttgccaagataaagaagttttaatggcagttgaaatggctagaaaagaaaaaatagcaaatgccattttagtaggagatatagaaaagactaaagaaattgcaaaaagcatagacatggatatcgaaaattatgaactgatagatataaaagatttagcagaagcatctctaaaatctgttgaattagtttcacaaggaaaagccgacatggtaatgaaaggcttagtagacacatcaataatactaaaagcagttttaaataaagaagtaggtcttagaactggaaatgtattaagtcacgtagcagtatttgatgtagagggatatgatagattatttttcgtaactgacgcagctatgaacttagctcctgatacaaatactaaaaagcaaatcatagaaaatgcttgcacagtagcacattcattagatataagtgaaccaaaagttgctgcaatatgcgcaaaagaaaaagtaaatccaaaaatgaaagatacagttgaagctaaagaactagaagaaatgtatgaaagaggagaaatcaaaggttgtatggttggtgggccttttgcaattgataatgcagtatctttagaagcagctaaacataaaggtataaatcatcctgtagcaggacgagctgatatattattagccccagatattgaaggtggtaacatattatataaagctttggtattcttctcaaaatcaaaaaatgcaggagttatagttggggctaaagcaccaataatattaacttctagagcagacagtgaagaaactaaactaaactcaatagctttaggtgttttaatggcagcaaaggcataataagaaggagatatacatatgagcaaaatatttaaaatcttaacaataaatcctggttcgacatcaactaaaatagctgtatttgataatgaggatttagtatttgaaaaaactttaagacattcttcagaagaaataggaaaatatgagaaggtgtctgaccaatttgaatttcgtaaacaagtaatagaagaagctctaaaagaaggtggagtaaaaacatctgaattagatgctgtagtaggtagaggaggacttcttaaacctataaaaggtggtacttattcagtaagtgctgctatgattgaagatttaaaagtgggagttttaggagaacacgcttcaaacctaggtggaataatagcaaaacaaataggtgaagaagtaaatgttccttcatacatagtagaccctgttgttgtagatgaattagaagatgttgctagaatttctggtatgcctgaaataagtagagcaagtgtagtacatgctttaaatcaaaaggcaatagcaagaagatatgctagagaaataaacaagaaatatgaagatataaatcttatagttgcacacatgggtggaggagtttctgttggagctcataaaaatggtaaaatagtagatgttgcaaacgcattagatggagaaggacctttctctccagaaagaagtggtggactaccagtaggtgcattagtaaaaatgtgctttagtggaaaatatactcaagatgaaattaaaaagaaaataaaaggtaatggcggactagttgcatacttaaacactaatgatgctagagaagttgaagaaagaattgaagctggtgatgaaaaagctaaattagtatatgaagctatggcatatcaaatctctaaagaaataggagctagtgctgcagttcttaagggagatgtaaaagcaatattattaactggtggaatcgcatattcaaaaatgtttacagaaatgattgcagatagagttaaatttatagcagatgtaaaagtttatccaggtgaagatgaaatgattgcattagctcaaggtggacttagagttttaactggtgaagaagaggctcaagtttatgataactaataa

SEQ ID NO: 225 - DNA, 3118 bp, Artificial Sequence
  Synthetic
ctcgagatgctagcaattgtgagcggataacaattgacattgtgagcggataacaagatactgagcacatcagcaggacgcactgaccttaattaaaagaattcattaaagaggagaaaggtaccatgaatattcgtgatcttgagtacctggtggcattggctgaacaccgccattttcggcgtgcggcagattcctgccacgttagccagccgacgcttagcgggcaaattcgtaagctggaagatgagctgggcgtgatgttgctggagcggaccagccgtaaagtgttgttcacccaggcgggaatgctgctggtggatcaggcgcgtaccgtgctgcgtgaggtgaaagtccttaaagagatggcaagccagcagggcgagacgatgtccggaccgctgcacattggtttgattcccacagttggaccgtacctgctaccgcatattatccctatgctgcaccagacctttccaaagctggaaatgtatctgcatgaagcacagacccaccagttactggcgcaactggacagcggcaaactcgattgcgtgatcctcgcgctggtgaaagagagcgaagcattcattgaagtgccgttgtttgatgagccaatgttgctggctatctatgaagatcacccgtgggcgaaccgcgaatgcgtaccgatggccgatctggcaggggaaaaactgctgatgctggaagatggtcactgtttgcgcgatcaggcaatgggtttctgttttgaagccggggcggatgaagatacacacttccgcgcgaccagcctggaaactctgcgcaacatggtggcggcaggtagcgggatcactttactgccagcgctggctgtgccgccggagcgcaaacgcgatggggttgtttatctgccgtgcattaagccggaaccacgccgcactattggcctggtttatcgtcctggctcaccgctgcgcagccgctatgagcagctggcagaggccatccgcgcaagaatggatggccatttcgataaagttttaaaacaggcggtttaaggatcccatggtacgcgtgctagaggcatcaaataaaacgaaaggctcagtcgaaagactgggcctttcgttttatctgttgtttgtcggtgaacgctctcctgagtaggacaaatccgccgccctagacctaggggatatattccgcttcctcgctcactgactcgctacgctcggtcgttcgactgcggcgagcggaaatggcttacgaacggggcggagatttcctggaagatgccaggaagatacttaacagggaagtgagagggccgcggcaaagccgtttttccataggctccgcccccctgacaagcatcacgaaatctgacgctcaaatcagtggtggcgaaacccgacaggactataaagataccaggcgtttccccctggcggctccctcgtgcgctctcctgttcctgcctttcggtttaccggtgtcattccgctgttatggccgcgtttgtctcattccacgcctgacactcagttccgggtaggcagttcgctccaagctggactgtatgcacgaaccccccgttcagtccgaccgctgcgccttatccggtaactatcgtcttgagtccaacccggaaagacatgcaaaagcaccactggcagcagccactggtaattgatttagaggagttagtcttgaagtcatgcgccggttaaggctaaactgaaaggacaagttttggtgactgcgctcctccaagccagttacctcggttcaaagagttggtagctcagagaaccttcgaaaaaccgccctgcaaggcggttttttcgttttcagagcaagagattacgcgcagaccaaaacgatctcaagaagatcatcttattaatcagataaaatatttctagatttcagtgcaatttatctcttcaaatgtagcacctgaagtcagccccatacgatataagttgttactagtgcttggattctcaccaataaaaaacgcccggcggcaaccgagcgttctgaacaaatccagatggagttctgaggtcattactggatctatcaacaggagtccaagcgagctctcgaaccccagagtcccgctcagaagaactcgtcaagaaggcgatagaaggcgatgcgctgcgaatcgggagcggcgataccgtaaagcacgaggaagcggtcagcccattcgccgccaagctcttcagcaatatcacgggtagccaacgctatgtcctgatagcggtccgccacacccagccggccacagtcgatgaatccagaaaagcggccattttccaccatgatattcggcaagcaggcatcgccatgggtcacgacgagatcctcgccgtcgggcatgcgcgccttgagcctggcgaacagttcggctggcgcgagcccctgatgctcttcgtccagatcatcctgatcgacaagaccggcttccatccgagtacgtgctcgctcgatgcgatgtttcgcttggtggtcgaatgggcaggtagccggatcaagcgtatgcagccgccgcattgcatcagccatgatggatactttctcggcaggagcaaggtgagatgacaggagatcctgccccggcacttcgcccaatagcagccagtcccttcccgcttcagtgacaacgtcgagcacagctgcgcaaggaacgcccgtcgtggccagccacgatagccgcgctgcctcgtcctgcagttcattcagggcaccggacaggtcggtcttgacaaaaagaaccgggcgcccctgcgctgacagccggaacacggcggcatcagagcagccgattgtctgttgtgcccagtcatagccgaatagcctctccacccaagcggccggagaacctgcgtgcaatccatcttgttcaatcatgcgaaacgatcctcatcctgtctcttgatcagatcttgatcccctgcgccatcagatccttggcggcaagaaagccatccagtttactttgcagggcttcccaaccttaccagagggcgccccagctggcaattccgacgtctaagaaaccattattatcatgacattaacctataaaaataggcgtatcacgaggccctttcgtcttcac

SEQ ID NO: 226 - DNA, 8650 bp, Artificial Sequence
  Synthetic
gtaaaacgacggccagtgaattcgttaagacccactttcacatttaagttgtttttctaatccgcatatgatcaattcaaggccgaataagaaggctggctctgcaccttggtgatcaaataattcgatagcttgtcgtaataatggcggcatactatcagtagtaggtgtttccctttcttctttagcgacttgatgctcttgatcttccaatacgcaacctaaagtaaaatgccccacagcgctgagtgcatataatgcattctctagtgaaaaaccttgttggcataaaaaggctaattgattttcgagagtttcatactgtttttctgtaggccgtgtacctaaatgtacttttgctccatcgcgatgacttagtaaagcacatctaaaacttttagcgttattacgtaaaaaatcttgccagctttccccttctaaagggcaaaagtgagtatggtgcctatctaacatctcaatggctaaggcgtcgagcaaagcccgcttattttttacatgccaatacaatgtaggctgctctacacctagcttctgggcgagtttacgggttgttaaaccttcgattccgacctcattaagcagctctaatgcgctgttaatcactttacttttatctaatctagacatcattaattcctaatttttgttgacactctatcattgatagagttattttaccactccctatcagtgatagagaaaagtgaactctagaaataattttgtttaactttaagaaggagatatacatatggatttaaattctaaaaaatatcagatgcttaaagagctatatgtaagcttcgctgaaaatgaagttaaacctttagcaacagaacttgatgaagaagaaagatttccttatgaaacagtggaaaaaatggcaaaagcaggaatgatgggtataccatatccaaaagaatatggtggagaaggtggagacactgtaggatatataatggcagttgaagaattgtctagagtttgtggtactacaggagttatattatcagctcatacatctcttggctcatggcctatatatcaatatggtaatgaagaacaaaaacaaaaattcttaagaccactagcaagtggagaaaaattaggagcatttggtcttactgagcctaatgctggtacagatgcgtctggccaacaaacaactgctgttttagacggggatgaatacatacttaatggctcaaaaatatttataacaaacgcaatagctggtgacatatatgtagtaatggcaatgactgataaatctaaggggaacaaaggaatatcagcatttatagttgaaaaaggaactcctgggtttagctttggagttaaagaaaagaaaatgggtataagaggttcagctacgagtgaattaatatttgaggattgcagaatacctaaagaaaatttacttggaaaagaaggtcaaggatttaagatagcaatgtctactcttgatggtggtagaattggtatagctgcacaagctttaggtttagcacaaggtgctcttgatgaaactgttaaatatgtaaaagaaagagtacaatttggtagaccattatcaaaattccaaaatacacaattccaattagctgatatggaagttaaggtacaagcggctagacaccttgtatatcaagcagctataaataaagacttaggaaaaccttatggagtagaagcagcaatggcaaaattatttgcagctgaaacagctatggaagttactacaaaagctgtacaacttcatggaggatatggatacactcgtgactatccagtagaaagaatgatgagagatgctaagataactgaaatatatgaaggaactagtgaagttcaaagaatggttatttcaggaaaactattaaaatagtaagaaggagatatacatatggaggaaggatttatgaatatagtcgtttgtataaaacaagttccagatacaacagaagttaaactagatcctaatacaggtactttaattagagatggagtaccaagtataataaaccctgatgataaagcaggtttagaagaagctataaaattaaaagaagaaatgggtgctcatgtaactgttataacaatgggacctcctcaagcagatatggctttaaaagaagctttagcaatgggtgcagatagaggtatattattaacagatagagcatttgcgggtgctgatacttgggcaacttcatcagcattagcaggagcattaaaaaatatagattttgatattataatagctggaagacaggcgatagatggagatactgcacaagttggacctcaaatagctgaacatttaaatcttccatcaataacatatgctgaagaaataaaaactgaaggtgaatatgtattagtaaaaagacaatttgaagattgttgccatgacttaaaagttaaaatgccatgccttataacaactcttaaagatatgaacacaccaagatacatgaaagttggaagaatatatgatgctttcgaaaatgatgtagtagaaacatggactgtaaaagatatagaagttgacccttctaatttaggtcttaaaggttctccaactagtgtatttaaatcatttacaaaatcagttaaaccagctggtacaatatacaatgaagatgcgaaaacatcagctggaattatcatagataaattaaaagagaagtatatcatataataagaaggagatatacatatgggtaacgttttagtagtaatagaacaaagagaaaatgtaattcaaactgtttctttagaattactaggaaaggctacagaaatagcaaaagattatgatacaaaagtttctgcattacttttaggtagtaaggtagaaggtttaatagatacattagcacactatggtgcagatgaggtaatagtagtagatgatgaagctttagcagtgtatacaactgaaccatatacaaaagcagcttatgaagcaataaaagcagctgaccctatagttgtattatttggtgcaacttcaataggtagagatttagcgcctagagtttctgctagaatacatacaggtcttactgctgactgtacaggtcttgcagtagctgaagatacaaaattattattaatgacaagacctgcctttggtggaaatataatggcaacaatagtttgtaaagatttcagacctcaaatgtctacagttagaccaggggttatgaagaaaaatgaacctgatgaaactaaagaagctgtaattaaccgtttcaaggtagaatttaatgatgctgataaattagttcaagttgtacaagtaataaaagaagctaaaaaacaagttaaaatagaagatgctaagatattagtttctgctggacgtggaatgggtggaaaagaaaacttagacatactttatgaattagctgaaattataggtggagaagtttctggttctcgtgccactatagatgcaggttggttagataaagcaagacaagttggtcaaactggtaaaactgtaagaccagacctttatatagcatgtggtatatctggagcaatacaacatatagctggtatggaagatgctgagtttatagttgctataaataaaaatccagaagctccaatatttaaatatgctgatgttggtatagttggagatgttcataaagtgcttccagaacttatcagtcagttaagtgttgcaaaagaaaaaggtgaagttttagctaactaataagaaggagatatacatatgagagaagtagtaattgccagtgcagctagaacagcagtaggaagttttggaggagcatttaaatcagtttcagcggtagagttaggggtaacagcagctaaagaagctataaaaagagctaacataactccagatatgatagatgaatctcttttagggggagtacttacagcaggtcttggacaaaatatagcaagacaaatagcattaggagcaggaataccagtagaaaaaccagctatgactataaatatagtttgtggttctggattaagatctgtttcaatggcatctcaacttatagcattaggtgatgctgatataatgttagttggtggagctgaaaacatgagtatgtctccttatttagtaccaagtgcgagatatggtgcaagaatgggtgatgctgcttttgttgattcaatgataaaagatggattatcagacatatttaataactatcacatgggtattactgctgaaaacatagcagagcaatggaatataactagagaagaacaagatgaattagctcttgcaagtcaaaataaagctgaaaaagctcaagctgaaggaaaatttgatgaagaaatagttcctgttgttataaaaggaagaaaaggtgacactgtagtagataaagatgaatatattaagcctggcactacaatggagaaacttgctaagttaagacctgcatttaaaaaagatggaacagttactgctggtaatgcatcaggaataaatgatggtgctgctatgttagtagtaatggctaaagaaaaagctgaagaactaggaatagagcctcttgcaactatagtttcttatggaacagctggtgttgaccctaaaataatgggatatggaccagttccagcaactaaaaaagctttagaagctgctaatatgactattgaagatatagatttagttgaagctaatgaggcatttgctgcccaatctgtagctgtaataagagacttaaatatagatatgaataaagttaatgttaatggtggagcaatagctataggacatccaataggatgctcaggagcaagaatacttactacacttttatatgaaatgaagagaagagatgctaaaactggtcttgctacactttgtataggcggtggaatgggaactactttaatagttaagagatagtaagaaggagatatacatatgaaattagctgtaataggtagtggaactatgggaagtggtattgtacaaacttttgcaagttgtggacatgatgtatgtttaaagagtagaactcaaggtgctatagataaatgtttagctttattagataaaaatttaactaagttagttactaagggaaaaatggatgaagctacaaaagcagaaatattaagtcatgttagttcaactactaattatgaagatttaaaagatatggatttaataatagaagcatctgtagaagacatgaatataaagaaagatgttttcaagttactagatgaattatgtaaagaagatactatcttggcaacaaatacttcatcattatctataacagaaatagcttcttctactaagcgcccagataaagttataggaatgcatttctttaatccagttcctatgatgaaattagttgaagttataagtggtcagttaacatcaaaagttacttttgatacagtatttgaattatctaagagtatcaataaagtaccagtagatgtatctgaatctcctggatttgtagtaaatagaatacttatacctatgataaatgaagctgttggtatatatgcagatggtgttgcaagtaaagaagaaatagatgaagctatgaaattaggagcaaaccatccaatgggaccactagcattaggtgatttaatcggattagatgttgttttagctataatgaacgttttatatactgaatttggagatactaaatatagacctcatccacttttagctaaaatggttagagctaatcaattaggaagaaaaactaagataggattctatgattataataaataataagaaggagatatacatatgagtacaagtgatgttaaagtttatgagaatgtagctgttgaagtagatggaaatatatgtacagtgaaaatgaatagacctaaagcccttaatgcaataaattcaaagactttagaagaactttatgaagtatttgtagatattaataatgatgaaactattgatgttgtaatattgacaggggaaggaaaggcatttgtagctggagcagatattgcatacatgaaagatttagatgctgtagctgctaaagattttagtatcttaggagcaaaagcttttggagaaatagaaaatagtaaaaaagtagtgatagctgctgtaaacggatttgctttaggtggaggatgtgaacttgcaatggcatgtgatataagaattgcatctgctaaagctaaatttggtcagccagaagtaactcttggaataactccaggatatggaggaactcaaaggcttacaagattggttggaatggcaaaagcaaaagaattaatctttacaggtcaagttataaaagctgatgaagctgaaaaaatagggctagtaaatagagtcgttgagccagacattttaatagaagaagttgagaaattagctaagataatagctaaaaatgctcagcttgcagttagatactctaaagaagcaatacaacttggtgctcaaactgatataaatactggaatagatatagaatctaatttatttggtctttgtttttcaactaaagaccaaaaagaaggaatgtcagctttcgttgaaaagagagaagctaactttataaaagggtaataagaaggagatatacatatgagaagttttgaagaagtaattaagtttgcaaaagaaagaggacctaaaactatatcagtagcatgttgccaagataaagaagttttaatggcagttgaaatggctagaaaagaaaaaatagcaaatgccattttagtaggagatatagaaaagactaaagaaattgcaaaaagcatagacatggatatcgaaaattatgaactgatagatataaaagatttagcagaagcatctctaaaatctgttgaattagtttcacaaggaaaagccgacatggtaatgaaaggcttagtagacacatcaataatactaaaagcagttttaaataaagaagtaggtcttagaactggaaatgtattaagtcacgtagcagtatttgatgtagagggatatgatagattatttttcgtaactgacgcagctatgaacttagctcctgatacaaatactaaaaagcaaatcatagaaaatgcttgcacagtagcacattcattagatataagtgaaccaaaagttgctgcaatatgcgcaaaagaaaaagtaaatccaaaaatgaaagatacagttgaagctaaagaactagaagaaatgtatgaaagaggagaaatcaaaggttgtatggttggtgggccttttgcaattgataatgcagtatctttagaagcagctaaacataaaggtataaatcatcctgtagcaggacgagctgatatattattagccccagatattgaaggtggtaacatattatataaagctttggtattcttctcaaaatcaaaaaatgcaggagttatagttggggctaaagcaccaataatattaacttctagagcagacagtgaagaaactaaactaaactcaatagctttaggtgttttaatggcagcaaaggcataataagaaggagatatacatatgagcaaaatatttaaaatcttaacaataaatcctggttcgacatcaactaaaatagctgtatttgataatgaggatttagtatttgaaaaaactttaagacattcttcagaagaaataggaaaatatgagaaggtgtctgaccaatttgaatttcgtaaacaagtaatagaagaagctctaaaagaaggtggagtaaaaacatctgaattagatgctgtagtaggtagaggaggacttcttaaacctataaaaggtggtacttattcagtaagtgctgctatgattgaagatttaaaagtgggagttttaggagaacacgcttcaaacctaggtggaataatagcaaaacaaataggtgaagaagtaaatgttccttcatacatagtagaccctgttgttgtagatgaattagaagatgttgctagaatttctggtatgcctgaaataagtagagcaagtgtagtacatgctttaaatcaaaaggcaatagcaagaagatatgctagagaaataaacaagaaatatgaagatataaatcttatagttgcacacatgggtggaggagtttctgttggagctcataaaaatggtaaaatagtagatgttgcaaacgcattagatggagaaggacctttctctccagaaagaagtggtggactaccagtaggtgcattagtaaaaatgtgctttagtggaaaatatactcaagatgaaattaaaaagaaaataaaaggtaatggcggactagttgcatacttaaacactaatgatgctagagaagttgaagaaagaattgaagctggtgatgaaaaagctaaattagtatatgaagctatggcatatcaaatctctaaagaaataggagctagtgctgcagttcttaagggagatgtaaaagcaatattattaactggtggaatcgcatattcaaaaatgtttacagaaatgattgcagatagagttaaatttatagcagatgtaaaagtttatccaggtgaagatgaaatgattgcattagctcaaggtggacttagagttttaactggtgaagaagaggctcaagtttatgataactaataa

SEQ ID NO: 227 - DNA, 6862 bp, Artificial Sequence
  Synthetic
gtaaaacgacggccagtgaattcgttaagacccactttcacatttaagttgtttttctaatccgcatatgatcaattcaaggccgaataagaaggctggctctgcaccttggtgatcaaataattcgatagcttgtcgtaataatggcggcatactatcagtagtaggtgtttccctttcttctttagcgacttgatgctcttgatcttccaatacgcaacctaaagtaaaatgccccacagcgctgagtgcatataatgcattctctagtgaaaaaccttgttggcataaaaaggctaattgattttcgagagtttcatactgtttttctgtaggccgtgtacctaaatgtacttttgctccatcgcgatgacttagtaaagcacatctaaaacttttagcgttattacgtaaaaaatcttgccagctttccccttctaaagggcaaaagtgagtatggtgcctatctaacatctcaatggctaaggcgtcgagcaaagcccgcttattttttacatgccaatacaatgtaggctgctctacacctagcttctgggcgagtttacgggttgttaaaccttcgattccgacctcattaagcagctctaatgcgctgttaatcactttacttttatctaatctagacatcattaattcctaatttttgttgacactctatcattgatagagttattttaccactccctatcagtgatagagaaaagtgaactctagaaataattttgtttaactttaagaaggagatatacatatgatcgtaaaacctatggtacgcaacaatatctgcctgaacgcccatcctcagggctgcaagaagggagtggaagatcagattgaatataccaagaaacgcattaccgcagaagtcaaagctggcgcaaaagctccaaaaaacgttctggtgcttggctgctcaaatggttacggcctggcgagccgcattactgctgcgttcggatacggggctgcgaccatcggcgtgtcctttgaaaaagcgggttcagaaaccaaatatggtacaccgggatggtacaataatttggcatttgatgaagcggcaaaacgcgagggtctttatagcgtgacgatcgacggcgatgcgttttcagacgagatcaaggcccaggtaattgaggaagccaaaaaaaaaggtatcaaatttgatctgatcgtatacagcttggccagcccagtacgtactgatcctgatacaggtatcatgcacaaaagcgttttgaaaccctttggaaaaacgttcacaggcaaaacagtagatccgtttactggcgagctgaaggaaatctccgcggaaccagcaaatgacgaggaagcagccgccactgttaaagttatggggggtgaagattgggaacgttggattaagcagctgtcgaaggaaggcctcttagaagaaggctgtattaccttggcctatagttatattggccctgaagctacccaagctttgtaccgtaaaggcacaatcggcaaggccaaagaacacctggaggccacagcacaccgtctcaacaaagagaacccgtcaatccgtgccttcgtgagcgtgaataaaggcctggtaacccgcgcaagcgccgtaatcccggtaatccctctgtatctcgccagcttgttcaaagtaatgaaagagaagggcaatcatgaaggttgtattgaacagatcacgcgtctgtacgccgagcgcctgtaccgtaaagatggtacaattccagttgatgaggaaaatcgcattcgcattgatgattgggagttagaagaagacgtccagaaagcggtatccgcgttgatggagaaagtcacgggtgaaaacgcagaatctctcactgacttagcggggtaccgccatgatttcttagctagtaacggctttgatgtagaaggtattaattatgaagcggaagttgaacgcttcgaccgtatctgataagaaggagatatacatatgagagaagtagtaattgccagtgcagctagaacagcagtaggaagttttggaggagcatttaaatcagtttcagcggtagagttaggggtaacagcagctaaagaagctataaaaagagctaacataactccagatatgatagatgaatctcttttagggggagtacttacagcaggtcttggacaaaatatagcaagacaaatagcattaggagcaggaataccagtagaaaaaccagctatgactataaatatagtttgtggttctggattaagatctgtttcaatggcatctcaacttatagcattaggtgatgctgatataatgttagttggtggagctgaaaacatgagtatgtctccttatttagtaccaagtgcgagatatggtgcaagaatgggtgatgctgcttttgttgattcaatgataaaagatggattatcagacatatttaataactatcacatgggtattactgctgaaaacatagcagagcaatggaatataactagagaagaacaagatgaattagctcttgcaagtcaaaataaagctgaaaaagctcaagctgaaggaaaatttgatgaagaaatagttcctgttgttataaaaggaagaaaaggtgacactgtagtagataaagatgaatatattaagcctggcactacaatggagaaacttgctaagttaagacctgcatttaaaaaagatggaacagttactgctggtaatgcatcaggaataaatgatggtgctgctatgttagtagtaatggctaaagaaaaagctgaagaactaggaatagagcctcttgcaactatagtttcttatggaacagctggtgttgaccctaaaataatgggatatggaccagttccagcaactaaaaaagctttagaagctgctaatatgactattgaagatatagatttagttgaagctaatgaggcatttgctgcccaatctgtagctgtaataagagacttaaatatagatatgaataaagttaatgttaatggtggagcaatagctataggacatccaataggatgctcaggagcaagaatacttactacacttttatatgaaatgaagagaagagatgctaaaactggtcttgctacactttgtataggcggtggaatgggaactactttaatagttaagagatagtaagaaggagatatacatatgaaattagctgtaataggtagtggaactatgggaagtggtattgtacaaacttttgcaagttgtggacatgatgtatgtttaaagagtagaactcaaggtgctatagataaatgtttagctttattagataaaaatttaactaagttagttactaagggaaaaatggatgaagctacaaaagcagaaatattaagtcatgttagttcaactactaattatgaagatttaaaagatatggatttaataatagaagcatctgtagaagacatgaatataaagaaagatgttttcaagttactagatgaattatgtaaagaagatactatcttggcaacaaatacttcatcattatctataacagaaatagcttcttctactaagcgcccagataaagttataggaatgcatttctttaatccagttcctatgatgaaattagttgaagttataagtggtcagttaacatcaaaagttacttttgatacagtatttgaattatctaagagtatcaataaagtaccagtagatgtatctgaatctcctggatttgtagtaaatagaatacttatacctatgataaatgaagctgttggtatatatgcagatggtgttgcaagtaaagaagaaatagatgaagctatgaaattaggagcaaaccatccaatgggaccactagcattaggtgatttaatcggattagatgttgttttagctataatgaacgttttatatactgaatttggagatactaaatatagacctcatccacttttagctaaaatggttagagctaatcaattaggaagaaaaactaagataggattctatgattataataaataataagaaggagatatacatatgagtacaagtgatgttaaagtttatgagaatgtagctgttgaagtagatggaaatatatgtacagtgaaaatgaatagacctaaagcccttaatgcaataaattcaaagactttagaagaactttatgaagtatttgtagatattaataatgatgaaactattgatgttgtaatattgacaggggaaggaaaggcatttgtagctggagcagatattgcatacatgaaagatttagatgctgtagctgctaaagattttagtatcttaggagcaaaagcttttggagaaatagaaaatagtaaaaaagtagtgatagctgctgtaaacggatttgctttaggtggaggatgtgaacttgcaatggcatgtgatataagaattgcatctgctaaagctaaatttggtcagccagaagtaactcttggaataactccaggatatggaggaactcaaaggcttacaagattggttggaatggcaaaagcaaaagaattaatctttacaggtcaagttataaaagctgatgaagctgaaaaaatagggctagtaaatagagtcgttgagccagacattttaatagaagaagttgagaaattagctaagataatagctaaaaatgctcagcttgcagttagatactctaaagaagcaatacaacttggtgctcaaactgatataaatactggaatagatatagaatctaatttatttggtctttgtttttcaactaaagaccaaaaagaaggaatgtcagctttcgttgaaaagagagaagctaactttataaaagggtaataagaaggagatatacatatgagaagttttgaagaagtaattaagtttgcaaaagaaagaggacctaaaactatatcagtagcatgttgccaagataaagaagttttaatggcagttgaaatggctagaaaagaaaaaatagcaaatgccattttagtaggagatatagaaaagactaaagaaattgcaaaaagcatagacatggatatcgaaaattatgaactgatagatataaaagatttagcagaagcatctctaaaatctgttgaattagtttcacaaggaaaagccgacatggtaatgaaaggcttagtagacacatcaataatactaaaagcagttttaaataaagaagtaggtcttagaactggaaatgtattaagtcacgtagcagtatttgatgtagagggatatgatagattatttttcgtaactgacgcagctatgaacttagctcctgatacaaatactaaaaagcaaatcatagaaaatgcttgcacagtagcacattcattagatataagtgaaccaaaagttgctgcaatatgcgcaaaagaaaaagtaaatccaaaaatgaaagatacagttgaagctaaagaactagaagaaatgtatgaaagaggagaaatcaaaggttgtatggttggtgggccttttgcaattgataatgcagtatctttagaagcagctaaacataaaggtataaatcatcctgtagcaggacgagctgatatattattagccccagatattgaaggtggtaacatattatataaagctttggtattcttctcaaaatcaaaaaatgcaggagttatagttggggctaaagcaccaataatattaacttctagagcagacagtgaagaaactaaactaaactcaatagctttaggtgttttaatggcagcaaaggcataataagaaggagatatacatatgagcaaaatatttaaaatcttaacaataaatcctggttcgacatcaactaaaatagctgtatttgataatgaggatttagtatttgaaaaaactttaagacattcttcagaagaaataggaaaatatgagaaggtgtctgaccaatttgaatttcgtaaacaagtaatagaagaagctctaaaagaaggtggagtaaaaacatctgaattagatgctgtagtaggtagaggaggacttcttaaacctataaaaggtggtacttattcagtaagtgctgctatgattgaagatttaaaagtgggagttttaggagaacacgcttcaaacctaggtggaataatagcaaaacaaataggtgaagaagtaaatgttccttcatacatagtagaccctgttgttgtagatgaattagaagatgttgctagaatttctggtatgcctgaaataagtagagcaagtgtagtacatgctttaaatcaaaaggcaatagcaagaagatatgctagagaaataaacaagaaatatgaagatataaatcttatagttgcacacatgggtggaggagtttctgttggagctcataaaaatggtaaaatagtagatgttgcaaacgcattagatggagaaggacctttctctccagaaagaagtggtggactaccagtaggtgcattagtaaaaatgtgctttagtggaaaatatactcaagatgaaattaaaaagaaaataaaaggtaatggcggactagttgcatacttaaacactaatgatgctagagaagttgaagaaagaattgaagctggtgatgaaaaagctaaattagtatatgaagctatggcatatcaaatctctaaagaaataggagctagtgctgcagttcttaagggagatgtaaaagcaatattattaactggtggaatcgcatattcaaaaatgtttacagaaatgattgcagatagagttaaatttatagcagatgtaaaagtttatccaggtgaagatgaaatgattgcattagctcaaggtggacttagagttttaactggtgaagaagaggctcaagtttatgataactaataa

SEQ ID NO: 228 - DNA, 5644 bp, Artificial Sequence
  Synthetic
ttattatcgcaccgcaatcgggattttcgattcataaagcaggtcgtaggtcggcttgttgagcaggtcttgcagcgtgaaaccgtccagatacgtgaaaaacgacttcattgcaccgccgagtatgcccgtcagccggcaggacggcgtaatcaggcattcgttgttcgggcccatacactcgaccagctgcatcggttcgaggtggcggacgaccgcgccgatattgatgcgttcgggcggcgcggccagcctcagcccgccgcctttcccgcgtacgctgtgcaagaacccgcctttgaccagcgcggtaaccactttcatcaaatggcttttggaaatgccgtaggtcgaggcgatggtggcgatattgaccagcgcgtcgtcgttgacggcggtgtagatgaggacgcgcagcccgtagtcggtatgttgggtcagatacatacaacctccttagtacatgcaaaattatttctagagcaacatacgagccggaagcataaagtgtaaagcctggggtgcctaatgagttgagttgaggaattataacaggaagaaatattcctcatacgcttgtaattcctctatggttgttgacaattaatcatcggctcgtataatgtataacattcatattttgtgaattttaaactctagaaataattttgtttaactttaagaaggagatatacatatgatcgtaaaacctatggtacgcaacaatatctgcctgaacgcccatcctcagggctgcaagaagggagtggaagatcagattgaatataccaagaaacgcattaccgcagaagtcaaagctggcgcaaaagctccaaaaaacgttctggtgcttggctgctcaaatggttacggcctggcgagccgcattactgctgcgttcggatacggggctgcgaccatcggcgtgtcctttgaaaaagcgggttcagaaaccaaatatggtacaccgggatggtacaataatttggcatttgatgaagcggcaaaacgcgagggtctttatagcgtgacgatcgacggcgatgcgttttcagacgagatcaaggcccaggtaattgaggaagccaaaaaaaaaggtatcaaatttgatctgatcgtatacagcttggccagcccagtacgtactgatcctgatacaggtatcatgcacaaaagcgttttgaaaccctttggaaaaacgttcacaggcaaaacagtagatccgtttactggcgagctgaaggaaatctccgcggaaccagcaaatgacgaggaagcagccgccactgttaaagttatggggggtgaagattgggaacgttggattaagcagctgtcgaaggaaggcctcttagaagaaggctgtattaccttggcctatagttatattggccctgaagctacccaagctttgtaccgtaaaggcacaatcggcaaggccaaagaacacctggaggccacagcacaccgtctcaacaaagagaacccgtcaatccgtgccttcgtgagcgtgaataaaggcctggtaacccgcgcaagcgccgtaatcccggtaatccctctgtatctcgccagcttgttcaaagtaatgaaagagaagggcaatcatgaaggttgtattgaacagatcacgcgtctgtacgccgagcgcctgtaccgtaaagatggtacaattccagttgatgaggaaaatcgcattcgcattgatgattgggagttagaagaagacgtccagaaagcggtatccgcgttgatggagaaagtcacgggtgaaaacgcagaatctctcactgacttagcggggtaccgccatgatttcttagctagtaacggctttgatgtagaaggtattaattatgaagcggaagttgaacgcttcgaccgtatctgataagaaggagatatacatatgagagaagtagtaattgccagtgcagctagaacagcagtaggaagttttggaggagcatttaaatcagtttcagcggtagagttaggggtaacagcagctaaagaagctataaaaagagctaacataactccagatatgatagatgaatctcttttagggggagtacttacagcaggtcttggacaaaatatagcaagacaaatagcattaggagcaggaataccagtagaaaaaccagctatgactataaatatagtttgtggttctggattaagatctgtttcaatggcatctcaacttatagcattaggtgatgctgatataatgttagttggtggagctgaaaacatgagtatgtctccttatttagtaccaagtgcgagatatggtgcaagaatgggtgatgctgcttttgttgattcaatgataaaagatggattatcagacatatttaataactatcacatgggtattactgctgaaaacatagcagagcaatggaatataactagagaagaacaagatgaattagctcttgcaagtcaaaataaagctgaaaaagctcaagctgaaggaaaatttgatgaagaaatagttcctgttgttataaaaggaagaaaaggtgacactgtagtagataaagatgaatatattaagcctggcactacaatggagaaacttgctaagttaagacctgcatttaaaaaagatggaacagttactgctggtaatgcatcaggaataaatgatggtgctgctatgttagtagtaatggctaaagaaaaagctgaagaactaggaatagagcctcttgcaactatagtttcttatggaacagctggtgttgaccctaaaataatgggatatggaccagttccagcaactaaaaaagctttagaagctgctaatatgactattgaagatatagatttagttgaagctaatgaggcatttgctgcccaatctgtagctgtaataagagacttaaatatagatatgaataaagttaatgttaatggtggagcaatagctataggacatccaataggatgctcaggagcaagaatacttactacacttttatatgaaatgaagagaagagatgctaaaactggtcttgctacactttgtataggcggtggaatgggaactactttaatagttaagagatagtaagaaggagatatacatatgaaattagctgtaataggtagtggaactatgggaagtggtattgtacaaacttttgcaagttgtggacatgatgtatgtttaaagagtagaactcaaggtgctatagataaatgtttagctttattagataaaaatttaactaagttagttactaagggaaaaatggatgaagctacaaaagcagaaatattaagtcatgttagttcaactactaattatgaagatttaaaagatatggatttaataatagaagcatctgtagaagacatgaatataaagaaagatgttttcaagttactagatgaattatgtaaagaagatactatcttggcaacaaatacttcatcattatctataacagaaatagcttcttctactaagcgcccagataaagttataggaatgcatttctttaatccagttcctatgatgaaattagttgaagttataagtggtcagttaacatcaaaagttacttttgatacagtatttgaattatctaagagtatcaataaagtaccagtagatgtatctgaatctcctggatttgtagtaaatagaatacttatacctatgataaatgaagctgttggtatatatgcagatggtgttgcaagtaaagaagaaatagatgaagctatgaaattaggagcaaaccatccaatgggaccactagcattaggtgatttaatcggattagatgttgttttagctataatgaacgttttatatactgaatttggagatactaaatatagacctcatccacttttagctaaaatggttagagctaatcaattaggaagaaaaactaagataggattctatgattataataaataataagaaggagatatacatatgagtacaagtgatgttaaagtttatgagaatgtagctgttgaagtagatggaaatatatgtacagtgaaaatgaatagacctaaagcccttaatgcaataaattcaaagactttagaagaactttatgaagtatttgtagatattaataatgatgaaactattgatgttgtaatattgacaggggaaggaaaggcatttgtagctggagcagatattgcatacatgaaagatttagatgctgtagctgctaaagattttagtatcttaggagcaaaagcttttggagaaatagaaaatagtaaaaaagtagtgatagctgctgtaaacggatttgctttaggtggaggatgtgaacttgcaatggcatgtgatataagaattgcatctgctaaagctaaatttggtcagccagaagtaactcttggaataactccaggatatggaggaactcaaaggcttacaagattggttggaatggcaaaagcaaaagaattaatctttacaggtcaagttataaaagctgatgaagctgaaaaaatagggctagtaaatagagtcgttgagccagacattttaatagaagaagttgagaaattagctaagataatagctaaaaatgctcagcttgcagttagatactctaaagaagcaatacaacttggtgctcaaactgatataaatactggaatagatatagaatctaatttatttggtctttgtttttcaactaaagaccaaaaagaaggaatgtcagctttcgttgaaaagagagaagctaactttataaaagggtaataagaaggagatatacatatgagtcaggcgctaaaaaatttactgacattgttaaatctggaaaaaattgaggaaggactctttcgcggccagagtgaagatttaggtttacgccaggtgtttggcggccaggtcgtgggtcaggccttgtatgctgcaaaagagaccgtccctgaagagcggctggtacattcgtttcacagctactttcttcgccctggcgatagtaagaagccgattatttatgatgtcgaaacgctgcgtgacggtaacagcttcagcgcccgccgggttgctgctattcaaaacggcaaaccgattttttatatgactgcctctttccaggcaccagaagcgggtttcgaacatcaaaaaacaatgccgtccgcgccagcgcctgatggcctcccttcggaaacgcaaatcgcccaatcgctggcgcacctgctgccgccagtgctgaaagataaattcatctgcgatcgtccgctggaagtccgtccggtggagtttcataacccactgaaaggtcacgtcgcagaaccacatcgtcaggtgtggatccgcgcaaatggtagcgtgccggatgacctgcgcgttcatcagtatctgctcggttacgcttctgatcttaacttcctgccggtagctctacagccgcacggcatcggttttctcgaaccggggattcagattgccaccattgaccattccatgtggttccatcgcccgtttaatttgaatgaatggctgctgtatagcgtggagagcacctcggcgtccagcgcacgtggctttgtgcgcggtgagttttatacccaagacggcgtactggttgcctcgaccgttcaggaaggggtgatgcgtaatcacaattaa

SEQ ID NO: 229 - DNA, 5719 bp, Artificial Sequence
  Synthetic
gtaaaacgacggccagtgaattcgttaagacccactttcacatttaagttgtttttctaatccgcatatgatcaattcaaggccgaataagaaggctggctctgcaccttggtgatcaaataattcgatagcttgtcgtaataatggcggcatactatcagtagtaggtgtttccctttcttctttagcgacttgatgctcttgatcttccaatacgcaacctaaagtaaaatgccccacagcgctgagtgcatataatgcattctctagtgaaaaaccttgttggcataaaaaggctaattgattttcgagagtttcatactgtttttctgtaggccgtgtacctaaatgtacttttgctccatcgcgatgacttagtaaagcacatctaaaacttttagcgttattacgtaaaaaatcttgccagctttccccttctaaagggcaaaagtgagtatggtgcctatctaacatctcaatggctaaggcgtcgagcaaagcccgcttattttttacatgccaatacaatgtaggctgctctacacctagcttctgggcgagtttacgggttgttaaaccttcgattccgacctcattaagcagctctaatgcgctgttaatcactttacttttatctaatctagacatcattaattcctaatttttgttgacactctatcattgatagagttattttaccactccctatcagtgatagagaaaagtgaactctagaaataattttgtttaactttaagaaggagatatacatatgatcgtaaaacctatggtacgcaacaatatctgcctgaacgcccatcctcagggctgcaagaagggagtggaagatcagattgaatataccaagaaacgcattaccgcagaagtcaaagctggcgcaaaagctccaaaaaacgttctggtgcttggctgctcaaatggttacggcctggcgagccgcattactgctgcgttcggatacggggctgcgaccatcggcgtgtcctttgaaaaagcgggttcagaaaccaaatatggtacaccgggatggtacaataatttggcatttgatgaagcggcaaaacgcgagggtctttatagcgtgacgatcgacggcgatgcgttttcagacgagatcaaggcccaggtaattgaggaagccaaaaaaaaaggtatcaaatttgatctgatcgtatacagcttggccagcccagtacgtactgatcctgatacaggtatcatgcacaaaagcgttttgaaaccctttggaaaaacgttcacaggcaaaacagtagatccgtttactggcgagctgaaggaaatctccgcggaaccagcaaatgacgaggaagcagccgccactgttaaagttatggggggtgaagattgggaacgttggattaagcagctgtcgaaggaaggcctcttagaagaaggctgtattaccttggcctatagttatattggccctgaagctacccaagctttgtaccgtaaaggcacaatcggcaaggccaaagaacacctggaggccacagcacaccgtctcaacaaagagaacccgtcaatccgtgccttcgtgagcgtgaataaaggcctggtaacccgcgcaagcgccgtaatcccggtaatccctctgtatctcgccagcttgttcaaagtaatgaaagagaagggcaatcatgaaggttgtattgaacagatcacgcgtctgtacgccgagcgcctgtaccgtaaagatggtacaattccagttgatgaggaaaatcgcattcgcattgatgattgggagttagaagaagacgtccagaaagcggtatccgcgttgatggagaaagtcacgggtgaaaacgcagaatctctcactgacttagcggggtaccgccatgatttcttagctagtaacggctttgatgtagaaggtattaattatgaagcggaagttgaacgcttcgaccgtatctgataagaaggagatatacatatgagagaagtagtaattgccagtgcagctagaacagcagtaggaagttttggaggagcatttaaatcagtttcagcggtagagttaggggtaacagcagctaaagaagctataaaaagagctaacataactccagatatgatagatgaatctcttttagggggagtacttacagcaggtcttggacaaaatatagcaagacaaatagcattaggagcaggaataccagtagaaaaaccagctatgactataaatatagtttgtggttctggattaagatctgtttcaatggcatctcaacttatagcattaggtgatgctgatataatgttagttggtggagctgaaaacatgagtatgtctccttatttagtaccaagtgcgagatatggtgcaagaatgggtgatgctgcttttgttgattcaatgataaaagatggattatcagacatatttaataactatcacatgggtattactgctgaaaacatagcagagcaatggaatataactagagaagaacaagatgaattagctcttgcaagtcaaaataaagctgaaaaagctcaagctgaaggaaaatttgatgaagaaatagttcctgttgttataaaaggaagaaaaggtgacactgtagtagataaagatgaatatattaagcctggcactacaatggagaaacttgctaagttaagacctgcatttaaaaaagatggaacagttactgctggtaatgcatcaggaataaatgatggtgctgctatgttagtagtaatggctaaagaaaaagctgaagaactaggaatagagcctcttgcaactatagtttcttatggaacagctggtgttgaccctaaaataatgggatatggaccagttccagcaactaaaaaagctttagaagctgctaatatgactattgaagatatagatttagttgaagctaatgaggcatttgctgcccaatctgtagctgtaataagagacttaaatatagatatgaataaagttaatgttaatggtggagcaatagctataggacatccaataggatgctcaggagcaagaatacttactacacttttatatgaaatgaagagaagagatgctaaaactggtcttgctacactttgtataggcggtggaatgggaactactttaatagttaagagatagtaagaaggagatatacatatgaaattagctgtaataggtagtggaactatgggaagtggtattgtacaaacttttgcaagttgtggacatgatgtatgtttaaagagtagaactcaaggtgctatagataaatgtttagctttattagataaaaatttaactaagttagttactaagggaaaaatggatgaagctacaaaagcagaaatattaagtcatgttagttcaactactaattatgaagatttaaaagatatggatttaataatagaagcatctgtagaagacatgaatataaagaaagatgttttcaagttactagatgaattatgtaaagaagatactatcttggcaacaaatacttcatcattatctataacagaaatagcttcttctactaagcgcccagataaagttataggaatgcatttctttaatccagttcctatgatgaaattagttgaagttataagtggtcagttaacatcaaaagttacttttgatacagtatttgaattatctaagagtatcaataaagtaccagtagatgtatctgaatctcctggatttgtagtaaatagaatacttatacctatgataaatgaagctgttggtatatatgcagatggtgttgcaagtaaagaagaaatagatgaagctatgaaattaggagcaaaccatccaatgggaccactagcattaggtgatttaatcggattagatgttgttttagctataatgaacgttttatatactgaatttggagatactaaatatagacctcatccacttttagctaaaatggttagagctaatcaattaggaagaaaaactaagataggattctatgattataataaataataagaaggagatatacatatgagtacaagtgatgttaaagtttatgagaatgtagctgttgaagtagatggaaatatatgtacagtgaaaatgaatagacctaaagcccttaatgcaataaattcaaagactttagaagaactttatgaagtatttgtagatattaataatgatgaaactattgatgttgtaatattgacaggggaaggaaaggcatttgtagctggagcagatattgcatacatgaaagatttagatgctgtagctgctaaagattttagtatcttaggagcaaaagcttttggagaaatagaaaatagtaaaaaagtagtgatagctgctgtaaacggatttgctttaggtggaggatgtgaacttgcaatggcatgtgatataagaattgcatctgctaaagctaaatttggtcagccagaagtaactcttggaataactccaggatatggaggaactcaaaggcttacaagattggttggaatggcaaaagcaaaagaattaatctttacaggtcaagttataaaagctgatgaagctgaaaaaatagggctagtaaatagagtcgttgagccagacattttaatagaagaagttgagaaattagctaagataatagctaaaaatgctcagcttgcagttagatactctaaagaagcaatacaacttggtgctcaaactgatataaatactggaatagatatagaatctaatttatttggtctttgtttttcaactaaagaccaaaaagaaggaatgtcagctttcgttgaaaagagagaagctaactttataaaagggtaataagaaggagatatacatatgagtcaggcgctaaaaaatttactgacattgttaaatctggaaaaaattgaggaaggactctttcgcggccagagtgaagatttaggtttacgccaggtgtttggcggccaggtcgtgggtcaggccttgtatgctgcaaaagagaccgtccctgaagagcggctggtacattcgtttcacagctactttcttcgccctggcgatagtaagaagccgattatttatgatgtcgaaacgctgcgtgacggtaacagcttcagcgcccgccgggttgctgctattcaaaacggcaaaccgattttttatatgactgcctctttccaggcaccagaagcgggtttcgaacatcaaaaaacaatgccgtccgcgccagcgcctgatggcctcccttcggaaacgcaaatcgcccaatcgctggcgcacctgctgccgccagtgctgaaagataaattcatctgcgatcgtccgctggaagtccgtccggtggagtttcataacccactgaaaggtcacgtcgcagaaccacatcgtcaggtgtggatccgcgcaaatggtagcgtgccggatgacctgcgcgttcatcagtatctgctcggttacgcttctgatcttaacttcctgccggtagctctacagccgcacggcatcggttttctcgaaccggggattcagattgccaccattgaccattccatgtggttccatcgcccgtttaatttgaatgaatggctgctgtatagcgtggagagcacctcggcgtccagcgcacgtggctttgtgcgcggtgagttttatacccaagacggcgtactggttgcctcgaccgttcaggaaggggtgatgcgtaatcacaattaa

SEQ ID NO: 230 - DNA, 180 bp, Artificial Sequence; identical to SEQ ID NO: 183
  Synthetic

SEQ ID NO: 231 - DNA, 23 bp, Artificial Sequence
  Synthetic
tttgtttaactttaagaaggaga

SEQ ID NO: 232 - DNA, 6270 bp, Artificial Sequence
  Synthetic
catttcctctcatcccatccggggtgagagtcttttcccccgacttatggctcatgcatgcatcaaaaaagatgtgagcttgatcaaaaacaaaaaatatttcactcgacaggagtatttatattgcgcccggatccctctagaaataattttgtttaactttaagaaggagatatacatatgatcgtaaaacctatggtacgcaacaatatctgcctgaacgcccatcctcagggctgcaagaagggagtggaagatcagattgaatataccaagaaacgcattaccgcagaagtcaaagctggcgcaaaagctccaaaaaacgttctggtgcttggctgctcaaatggttacggcctggcgagccgcattactgctgcgttcggatacggggctgcgaccatcggcgtgtcctttgaaaaagcgggttcagaaaccaaatatggtacaccgggatggtacaataatttggcatttgatgaagcggcaaaacgcgagggtctttatagcgtgacgatcgacggcgatgcgttttcagacgagatcaaggcccaggtaattgaggaagccaaaaaaaaaggtatcaaatttgatctgatcgtatacagcttggccagcccagtacgtactgatcctgatacaggtatcatgcacaaaagcgttttgaaaccctttggaaaaacgttcacaggcaaaacagtagatccgtttactggcgagctgaaggaaatctccgcggaaccagcaaatgacgaggaagcagccgccactgttaaagttatggggggtgaagattgggaacgttggattaagcagctgtcgaaggaaggcctcttagaagaaggctgtattaccttggcctatagttatattggccctgaagctacccaagctttgtaccgtaaaggcacaatcggcaaggccaaagaacacctggaggccacagcacaccgtctcaacaaagagaacccgtcaatccgtgccttcgtgagcgtgaataaaggcctggtaacccgcgcaagcgccgtaatcccggtaatccctctgtatctcgccagcttgttcaaagtaatgaaagagaagggcaatcatgaaggttgtattgaacagatcacgcgtctgtacgccgagcgcctgtaccgtaaagatggtacaattccagttgatgaggaaaatcgcattcgcattgatgattgggagttagaagaagacgtccagaaagcggtatccgcgttgatggagaaagtcacgggtgaaaacgcagaatctctcactgacttagcggggtaccgccatgatttcttagctagtaacggctttgatgtagaaggtattaattatgaagcggaagttgaacgcttcgaccgtatctgataagaaggagatatacatatgagagaagtagtaattgccagtgcagctagaacagcagtaggaagttttggaggagcatttaaatcagtttcagcggtagagttaggggtaacagcagctaaagaagctataaaaagagctaacataactccagatatgatagatgaatctcttttagggggagtacttacagcaggtcttggacaaaatatagcaagacaaatagcattaggagcaggaataccagtagaaaaaccagctatgactataaatatagtttgtggttctggattaagatctgtttcaatggcatctcaacttatagcattaggtgatgctgatataatgttagttggtggagctgaaaacatgagtatgtctccttatttagtaccaagtgcgagatatggtgcaagaatgggtgatgctgcttttgttgattcaatgataaaagatggattatcagacatatttaataactatcacatgggtattactgctgaaaacatagcagagcaatggaatataactagagaagaacaagatgaattagctcttgcaagtcaaaataaagctgaaaaagctcaagctgaaggaaaatttgatgaagaaatagttcctgttgttataaaaggaagaaaaggtgacactgtagtagataaagatgaatatattaagcctggcactacaatggagaaacttgctaagttaagacctgcatttaaaaaagatggaacagttactgctggtaatgcatcaggaataaatgatggtgctgctatgttagtagtaatggctaaagaaaaagctgaagaactaggaatagagcctcttgcaactatagtttcttatggaacagctggtgttgaccctaaaataatgggatatggaccagttccagcaactaaaaaagctttagaagctgctaatatgactattgaagatatagatttagttgaagctaatgaggcatttgctgcccaatctgtagctgtaataagagacttaaatatagatatgaataaagttaatgttaatggtggagcaatagctataggacatccaataggatgctcaggagcaagaatacttactacacttttatatgaaatgaagagaagagatgctaaaactggtcttgctacactttgtataggcggtggaatgggaactactttaatagttaagagatagtaagaaggagatatacatatgaaattagctgtaataggtagtggaactatgggaagtggtattgtacaaacttttgcaagttgtggacatgatgtatgtttaaagagtagaactcaaggtgctatagataaatgtttagctttattagataaaaatttaactaagttagttactaagggaaaaatggatgaagctacaaaagcagaaatattaagtcatgttagttcaactactaattatgaagatttaaaagatatggatttaataatagaagcatctgtagaagacatgaatataaagaaagatgttttcaagttactagatgaattatgtaaagaagatactatcttggcaacaaatacttcatcattatctataacagaaatagcttcttctactaagcgcccagataaagttataggaatgcatttctttaatccagttcctatgatgaaattagttgaagttataagtggtcagttaacatcaaaagttacttttgatacagtatttgaattatctaagagtatcaataaagtaccagtagatgtatctgaatctcctggatttgtagtaaatagaatacttatacctatgataaatgaagctgttggtatatatgcagatggtgttgcaagtaaagaagaaatagatgaagctatgaaattaggagcaaaccatccaatgggaccactagcattaggtgatttaatcggattagatgttgttttagctataatgaacgttttatatactgaatttggagatactaaatatagacctcatccacttttagctaaaatggttagagctaatcaattaggaagaaaaactaagataggattctatgattataataaataataagaaggagatatacatatgagtacaagtgatgttaaagtttatgagaatgtagctgttgaagtagatggaaatatatgtacagtgaaaatgaatagacctaaagcccttaatgcaataaattcaaagactttagaagaactttatgaagtatttgtagatattaataatgatgaaactattgatgttgtaatattgacaggggaaggaaaggcatttgtagctggagcagatattgcatacatgaaagatttagatgctgtagctgctaaagattttagtatcttaggagcaaaagcttttggagaaatagaaaatagtaaaaaagtagtgatagctgctgtaaacggatttgctttaggtggaggatgtgaacttgcaatggcatgtgatataagaattgcatctgctaaagctaaatttggtcagccagaagtaactcttggaataactccaggatatggaggaactcaaaggcttacaagattggttggaatggcaaaagcaaaagaattaatctttacaggtcaagttataaaagctgatgaagctgaaaaaatagggctagtaaatagagtcgttgagccagacattttaatagaagaagttgagaaattagctaagataatagctaaaaatgctcagcttgcagttagatactctaaagaagcaatacaacttggtgctcaaactgatataaatactggaatagatatagaatctaatttatttggtctttgtttttcaactaaagaccaaaaagaaggaatgtcagctttcgttgaaaagagagaagctaactttataaaagggtaataagaaggagatatacatatgagaagttttgaagaagtaattaagtttgcaaaagaaagaggacctaaaactatatcagtagcatgttgccaagataaagaagttttaatggcagttgaaatggctagaaaagaaaaaatagcaaatgccattttagtaggagatatagaaaagactaaagaaattgcaaaaagcatagacatggatatcgaaaattatgaactgatagatataaaagatttagcagaagcatctctaaaatctgttgaattagtttcacaaggaaaagccgacatggtaatgaaaggcttagtagacacatcaataatactaaaagcagttttaaataaagaagtaggtcttagaactggaaatgtattaagtcacgtagcagtatttgatgtagagggatatgatagattatttttcgtaactgacgcagctatgaacttagctcctgatacaaatactaaaaagcaaatcatagaaaatgcttgcacagtagcacattcattagatataagtgaaccaaaagttgctgcaatatgcgcaaaagaaaaagtaaatccaaaaatgaaagatacagttgaagctaaagaactagaagaaatgtatgaaagaggagaaatcaaaggttgtatggttggtgggccttttgcaattgataatgcagtatctttagaagcagctaaacataaaggtataaatcatcctgtagcaggacgagctgatatattattagccccagatattgaaggtggtaacatattatataaagctttggtattcttctcaaaatcaaaaaatgcaggagttatagttggggctaaagcaccaataatattaacttctagagcagacagtgaagaaactaaactaaactcaatagctttaggtgttttaatggcagcaaaggcataataagaaggagatatacatatgagcaaaatatttaaaatcttaacaataaatcctggttcgacatcaactaaaatagctgtatttgataatgaggatttagtatttgaaaaaactttaagacattcttcagaagaaataggaaaatatgagaaggtgtctgaccaatttgaatttcgtaaacaagtaatagaagaagctctaaaagaaggtggagtaaaaacatctgaattagatgctgtagtaggtagaggaggacttcttaaacctataaaaggtggtacttattcagtaagtgctgctatgattgaagatttaaaagtgggagttttaggagaacacgcttcaaacctaggtggaataatagcaaaacaaataggtgaagaagtaaatgttccttcatacatagtagaccctgttgttgtagatgaattagaagatgttgctagaatttctggtatgcctgaaataagtagagcaagtgtagtacatgctttaaatcaaaaggcaatagcaagaagatatgctagagaaataaacaagaaatatgaagatataaatcttatagttgcacacatgggtggaggagtttctgttggagctcataaaaatggtaaaatagtagatgttgcaaacgcattagatggagaaggacctttctctccagaaagaagtggtggactaccagtaggtgcattagtaaaaatgtgctttagtggaaaatatactcaagatgaaattaaaaagaaaataaaaggtaatggcggactagttgcatacttaaacactaatgatgctagagaagttgaagaaagaattgaagctggtgatgaaaaagctaaattagtatatgaagctatggcatatcaaatctctaaagaaataggagctagtgctgcagttcttaagggagatgtaaaagcaatattattaactggtggaatcgcatattcaaaaatgtttacagaaatgattgcagatagagttaaatttatagcagatgtaaaagtttatccaggtgaagatgaaatgattgcattagctcaaggtggacttagagttttaactggtgaagaagaggctcaagtttatgataactaataa

SEQ ID NO: 233 - DNA, 5160 bp, Artificial Sequence
  Synthetic
ggtaccagttgttcttattggtggtgttgctttatggttgcatcgtagtaaatggttgtaacaaaagcaatttttccggctgtctgtatacaaaaacgccgcaaagtttgagcgaagtcaataaactctctacccattcagggcaatatctctcttggatccaaagtgaactctagaaataattttgtttaactttaagaaggagatatacatatgatcgtaaaacctatggtacgcaacaatatctgcctgaacgcccatcctcagggctgcaagaagggagtggaagatcagattgaatataccaagaaacgcattaccgcagaagtcaaagctggcgcaaaagctccaaaaaacgttctggtgcttggctgctcaaatggttacggcctggcgagccgcattactgctgcgttcggatacggggctgcgaccatcggcgtgtcctttgaaaaagcgggttcagaaaccaaatatggtacaccgggatggtacaataatttggcatttgatgaagcggcaaaacgcgagggtctttatagcgtgacgatcgacggcgatgcgttttcagacgagatcaaggcccaggtaattgaggaagccaaaaaaaaaggtatcaaatttgatctgatcgtatacagcttggccagcccagtacgtactgatcctgatacaggtatcatgcacaaaagcgttttgaaaccctttggaaaaacgttcacaggcaaaacagtagatccgtttactggcgagctgaaggaaatctccgcggaaccagcaaatgacgaggaagcagccgccactgttaaagttatggggggtgaagattgggaacgttggattaagcagctgtcgaaggaaggcctcttagaagaaggctgtattaccttggcctatagttatattggccctgaagctacccaagctttgtaccgtaaaggcacaatcggcaaggccaaagaacacctggaggccacagcacaccgtctcaacaaagagaacccgtcaatccgtgccttcgtgagcgtgaataaaggcctggtaacccgcgcaagcgccgtaatcccggtaatccctctgtatctcgccagcttgttcaaagtaatgaaagagaagggcaatcatgaaggttgtattgaacagatcacgcgtctgtacgccgagcgcctgtaccgtaaagatggtacaattccagttgatgaggaaaatcgcattcgcattgatgattgggagttagaagaagacgtccagaaagcggtatccgcgttgatggagaaagtcacgggtgaaaacgcagaatctctcactgacttagcggggtaccgccatgatttcttagctagtaacggctttgatgtagaaggtattaattatgaagcggaagttgaacgcttcgaccgtatctgataagaaggagatatacatatgagagaagtagtaattgccagtgcagctagaacagcagtaggaagttttggaggagcatttaaatcagtttcagcggtagagttaggggtaacagcagctaaagaagctataaaaagagctaacataactccagatatgatagatgaatctcttttagggggagtacttacagcaggtcttggacaaaatatagcaagacaaatagcattaggagcaggaataccagtagaaaaaccagctatgactataaatatagtttgtggttctggattaagatctgtttcaatggcatctcaacttatagcattaggtgatgctgatataatgttagttggtggagctgaaaacatgagtatgtctccttatttagtaccaagtgcgagatatggtgcaagaatgggtgatgctgcttttgttgattcaatgataaaagatggattatcagacatatttaataactatcacatgggtattactgctgaaaacatagcagagcaatggaatataactagagaagaacaagatgaattagctcttgcaagtcaaaataaagctgaaaaagctcaagctgaaggaaaatttgatgaagaaatagttcctgttgttataaaaggaagaaaaggtgacactgtagtagataaagatgaatatattaagcctggcactacaatggagaaacttgctaagttaagacctgcatttaaaaaagatggaacagttactgctggtaatgcatcaggaataaatgatggtgctgctatgttagtagtaatggctaaagaaaaagctgaagaactaggaatagagcctcttgcaactatagtttcttatggaacagctggtgttgaccctaaaataatgggatatggaccagttccagcaactaaaaaagctttagaagctgctaatatgactattgaagatatagatttagttgaagctaatgaggcatttgctgcccaatctgtagctgtaataagagacttaaatatagatatgaataaagttaatgttaatggtggagcaatagctataggacatccaataggatgctcaggagcaagaatacttactacacttttatatgaaatgaagagaagagatgctaaaactggtcttgctacactttgtataggcggtggaatgggaactactttaatagttaagagatagtaagaaggagatatacatatgaaattagctgtaataggtagtggaactatgggaagtggtattgtacaaacttttgcaagttgtggacatgatgtatgtttaaagagtagaactcaaggtgctatagataaatgtttagctttattagataaaaatttaactaagttagttactaagggaaaaatggatgaagctacaaaagcagaaatattaagtcatgttagttcaactactaattatgaagatttaaaagatatggatttaataatagaagcatctgtagaagacatgaatataaagaaagatgttttcaagttactagatgaattatgtaaagaagatactatcttggcaacaaatacttcatcattatctataacagaaatagcttcttctactaagcgcccagataaagttataggaatgcatttctttaatccagttcctatgatgaaattagttgaagttataagtggtcagttaacatcaaaagttacttttgatacagtatttgaattatctaagagtatcaataaagtaccagtagatgtatctgaatctcctggatttgtagtaaatagaatacttatacctatgataaatgaagctgttggtatatatgcagatggtgttgcaagtaaagaagaaatagatgaagctatgaaattaggagcaaaccatccaatgggaccactagcattaggtgatttaatcggattagatgttgttttagctataatgaacgttttatatactgaatttggagatactaaatatagacctcatccacttttagctaaaatggttagagctaatcaattaggaagaaaaactaagataggattctatgattataataaataataagaaggagatatacatatgagtacaagtgatgttaaagtttatgagaatgtagctgttgaagtagatggaaatatatgtacagtgaaaatgaatagacctaaagcccttaatgcaataaattcaaagactttagaagaactttatgaagtatttgtagatattaataatgatgaaactattgatgttgtaatattgacaggggaaggaaaggcatttgtagctggagcagatattgcatacatgaaagatttagatgctgtagctgctaaagattttagtatcttaggagcaaaagcttttggagaaatagaaaatagtaaaaaagtagtgatagctgctgtaaacggatttgctttaggtggaggatgtgaacttgcaatggcatgtgatataagaattgcatctgctaaagctaaatttggtcagccagaagtaactcttggaataactccaggatatggaggaactcaaaggcttacaagattggttggaatggcaaaagcaaaagaattaatctttacaggtcaagttataaaagctgatgaagctgaaaaaatagggctagtaaatagagtcgttgagccagacattttaatagaagaagttgagaaattagctaagataatagctaaaaatgctcagcttgcagttagatactctaaagaagcaatacaacttggtgctcaaactgatataaatactggaatagatatagaatctaatttatttggtctttgtttttcaactaaagaccaaaaagaaggaatgtcagctttcgttgaaaagagagaagctaactttataaaagggtaataagaaggagatatacatatgagtcaggcgctaaaaaatttactgacattgttaaatctggaaaaaattgaggaaggactctttcgcggccagagtgaagatttaggtttacgccaggtgtttggcggccaggtcgtgggtcaggccttgtatgctgcaaaagagaccgtccctgaagagcggctggtacattcgtttcacagctactttcttcgccctggcgatagtaagaagccgattatttatgatgtcgaaacgctgcgtgacggtaacagcttcagcgcccgccgggttgctgctattcaaaacggcaaaccgattttttatatgactgcctctttccaggcaccagaagcgggtttcgaacatcaaaaaacaatgccgtccgcgccagcgcctgatggcctcccttcggaaacgcaaatcgcccaatcgctggcgcacctgctgccgccagtgctgaaagataaattcatctgcgatcgtccgctggaagtccgtccggtggagtttcataacccactgaaaggtcacgtcgcagaaccacatcgtcaggtgtggatccgcgcaaatggtagcgtgccggatgacctgcgcgttcatcagtatctgctcggttacgcttctgatcttaacttcctgccggtagctctacagccgcacggcatcggttttctcgaaccggggattcagattgccaccattgaccattccatgtggttccatcgcccgtttaatttgaatgaatggctgctgtatagcgtggagagcacctcggcgtccagcgcacgtggctttgtgcgcggtgagttttatacccaagacggcgtactggttgcctcgaccgttcaggaaggggtgatgcgtaatcacaattaa

SEQ ID NO: 234 - DNA, 6300 bp, Artificial Sequence
  Synthetic
ggtaccagttgttcttattggtggtgttgctttatggttgcatcgtagtaaatggttgtaacaaaagcaatttttccggctgtctgtatacaaaaacgccgcaaagtttgagcgaagtcaataaactctctacccattcagggcaatatctctcttggatccaaagtgaactctagaaataattttgtttaactttaagaaggagatatacatatgatcgtaaaacctatggtacgcaacaatatctgcctgaacgcccatcctcagggctgcaagaagggagtggaagatcagattgaatataccaagaaacgcattaccgcagaagtcaaagctggcgcaaaagctccaaaaaacgttctggtgcttggctgctcaaatggttacggcctggcgagccgcattactgctgcgttcggatacggggctgcgaccatcggcgtgtcctttgaaaaagcgggttcagaaaccaaatatggtacaccgggatggtacaataatttggcatttgatgaagcggcaaaacgcgagggtctttatagcgtgacgatcgacggcgatgcgttttcagacgagatcaaggcccaggtaattgaggaagccaaaaaaaaaggtatcaaatttgatctgatcgtatacagcttggccagcccagtacgtactgatcctgatacaggtatcatgcacaaaagcgttttgaaaccctttggaaaaacgttcacaggcaaaacagtagatccgtttactggcgagctgaaggaaatctccgcggaaccagcaaatgacgaggaagcagccgccactgttaaagttatggggggtgaagattgggaacgttggattaagcagctgtcgaaggaaggcctcttagaagaaggctgtattaccttggcctatagttatattggccctgaagctacccaagctttgtaccgtaaaggcacaatcggcaaggccaaagaacacctggaggccacagcacaccgtctcaacaaagagaacccgtcaatccgtgccttcgtgagcgtgaataaaggcctggtaacccgcgcaagcgccgtaatcccggtaatccctctgtatctcgccagcttgttcaaagtaatgaaagagaagggcaatcatgaaggttgtattgaacagatcacgcgtctgtacgccgagcgcctgtaccgtaaagatggtacaattccagttgatgaggaaaatcgcattcgcattgatgattgggagttagaagaagacgtccagaaagcggtatccgcgttgatggagaaagtcacgggtgaaaacgcagaatctctcactgacttagcggggtaccgccatgatttcttagctagtaacggctttgatgtagaaggtattaattatgaagcggaagttgaacgcttcgaccgtatctgataagaaggagatatacatatgagagaagtagtaattgccagtgcagctagaacagcagtaggaagttttggaggagcatttaaatcagtttcagcggtagagttaggggtaacagcagctaaagaagctataaaaagagctaacataactccagatatgatagatgaatctcttttagggggagtacttacagcaggtcttggacaaaatatagcaagacaaatagcattaggagcaggaataccagtagaaaaaccagctatgactataaatatagtttgtggttctggattaagatctgtttcaatggcatctcaacttatagcattaggtgatgctgatataatgttagttggtggagctgaaaacatgagtatgtctccttatttagtaccaagtgcgagatatggtgcaagaatgggtgatgctgcttttgttgattcaatgataaaagatggattatcagacatatttaataactatcacatgggtattactgctgaaaacatagcagagcaatggaatataactagagaagaacaagatgaattagctcttgcaagtcaaaataaagctgaaaaagctcaagctgaaggaaaatttgatgaagaaatagttcctgttgttataaaaggaagaaaaggtgacactgtagtagataaagatgaatatattaagcctggcactacaatggagaaacttgctaagttaagacctgcatttaaaaaagatggaacagttactgctggtaatgcatcaggaataaatgatggtgctgctatgttagtagtaatggctaaagaaaaagctgaagaactaggaatagagcctcttgcaactatagtttcttatggaacagctggtgttgaccctaaaataatgggatatggaccagttccagcaactaaaaaagctttagaagctgctaatatgactattgaagatatagatttagttgaagctaatgaggcatttgctgcccaatctgtagctgtaataagagacttaaatatagatatgaataaagttaatgttaatggtggagcaatagctataggacatccaataggatgctcaggagcaagaatacttactacacttttatatgaaatgaagagaagagatgctaaaactggtcttgctacactttgtataggcggtggaatgggaactactttaatagttaagagatagtaagaaggagatatacatatgaaattagctgtaataggtagtggaactatgggaagtggtattgtacaaacttttgcaagttgtggacatgatgtatgtttaaagagtagaactcaaggtgctatagataaatgtttagctttattagataaaaatttaactaagttagttactaagggaaaaatggatgaagctacaaaagcagaaatattaagtcatgttagttcaactactaattatgaagatttaaaagatatggatttaataatagaagcatctgtagaagacatgaatataaagaaagatgttttcaagttactagatgaattatgtaaagaagatactatcttggcaacaaatacttcatcattatctataacagaaatagcttcttctactaagcgcccagataaagttataggaatgcatttctttaatccagttcctatgatgaaattagttgaagttataagtggtcagttaacatcaaaagttacttttgatacagtatttgaattatctaagagtatcaataaagtaccagtagatgtatctgaatctcctggatttgtagtaaatagaatacttatacctatgataaatgaagctgttggtatatatgcagatggtgttgcaagtaaagaagaaatagatgaagctatgaaattaggagcaaaccatccaatgggaccactagcattaggtgatttaatcggattagatgttgttttagctataatgaacgttttatatactgaatttggagatactaaatatagacctcatccacttttagctaaaatggttagagctaatcaattaggaagaaaaactaagataggattctatgattataataaataataagaaggagatatacatatgagtacaagtgatgttaaagtttatgagaatgtagctgttgaagtagatggaaatatatgtacagtgaaaatgaatagacctaaagcccttaatgcaataaattcaaagactttagaagaactttatgaagtatttgtagatattaataatgatgaaactattgatgttgtaatattgacaggggaaggaaaggcatttgtagctggagcagatattgcatacatgaaagatttagatgctgtagctgctaaagattttagtatcttaggagcaaaagcttttggagaaatagaaaatagtaaaaaagtagtgatagctgctgtaaacggatttgctttaggtggaggatgtgaacttgcaatggcatgtgatataagaattgcatctgctaaagctaaatttggtcagccagaagtaactcttggaataactccaggatatggaggaactcaaaggcttacaagattggttggaatggcaaaagcaaaagaattaatctttacaggtcaagttataaaagctgatgaagctgaaaaaatagggctagtaaatagagtcgttgagccagacattttaatagaagaagttgagaaattagctaagataatagctaaaaatgctcagcttgcagttagatactctaaagaagcaatacaacttggtgctcaaactgatataaatactggaatagatatagaatctaatttatttggtctttgtttttcaactaaagaccaaaaagaaggaatgtcagctttcgttgaaaagagagaagctaactttataaaagggtaataagaaggagatatacatatgagaagttttgaagaagtaattaagtttgcaaaagaaagaggacctaaaactatatcagtagcatgttgccaagataaagaagttttaatggcagttgaaatggctagaaaagaaaaaatagcaaatgccattttagtaggagatatagaaaagactaaagaaattgcaaaaagcatagacatggatatcgaaaattatgaactgatagatataaaagatttagcagaagcatctctaaaatctgttgaattagtttcacaaggaaaagccgacatggtaatgaaaggcttagtagacacatcaataatactaaaagcagttttaaataaagaagtaggtcttagaactggaaatgtattaagtcacgtagcagtatttgatgtagagggatatgatagattatttttcgtaactgacgcagctatgaacttagctcctgatacaaatactaaaaagcaaatcatagaaaatgcttgcacagtagcacattcattagatataagtgaaccaaaagttgctgcaatatgcgcaaaagaaaaagtaaatccaaaaatgaaagatacagttgaagctaaagaactagaagaaatgtatgaaagaggagaaatcaaaggttgtatggttggtgggccttttgcaattgataatgcagtatctttagaagcagctaaacataaaggtataaatcatcctgtagcaggacgagctgatatattattagccccagatattgaaggtggtaacatattatataaagctttggtattcttctcaaaatcaaaaaatgcaggagttatagttggggctaaagcaccaataatattaacttctagagcagacagtgaagaaactaaactaaactcaatagctttaggtgttttaatggcagcaaaggcataataagaaggagatatacatatgagcaaaatatttaaaatcttaacaataaatcctggttcgacatcaactaaaatagctgtatttgataatgaggatttagtatttgaaaaaactttaagacattcttcagaagaaataggaaaatatgagaaggtgtctgaccaatttgaatttcgtaaacaagtaatagaagaagctctaaaagaaggtggagtaaaaacatctgaattagatgctgtagtaggtagaggaggacttcttaaacctataaaaggtggtacttattcagtaagtgctgctatgattgaagatttaaaagtgggagttttaggagaacacgcttcaaacctaggtggaataatagcaaaacaaataggtgaagaagtaaatgttccttcatacatagtagaccctgttgttgtagatgaattagaagatgttgctagaatttctggtatgcctgaaataagtagagcaagtgtagtacatgctttaaatcaaaaggcaatagcaagaagatatgctagagaaataaacaagaaatatgaagatataaatcttatagttgcacacatgggtggaggagtttctgttggagctcataaaaatggtaaaatagtagatgttgcaaacgcattagatggagaaggacctttctctccagaaagaagtggtggactaccagtaggtgcattagtaaaaatgtgctttagtggaaaatatactcaagatgaaattaaaaagaaaataaaaggtaatggcggactagttgcatacttaaacactaatgatgctagagaagttgaagaaagaattgaagctggtgatgaaaaagctaaattagtatatgaagctatggcatatcaaatctctaaagaaataggagctagtgctgcagttcttaagggagatgtaaaagcaatattattaactggtggaatcgcatattcaaaaatgtttacagaaatgattgcagatagagttaaatttatagcagatgtaaaagtttatccaggtgaagatgaaatgattgcattagctcaaggtggacttagagttttaactggtgaagaagaggctcaagtttatgataactaa

SEQ ID NO: 235 - DNA, 213 bp, Artificial Sequence
  Synthetic
ggtaccagttgttcttattggtggtgttgctttatggttgcatcgtagtaaatggttgtaacaaaagcaatttttccggctgtctgtatacaaaaacgccgcaaagtttgagcgaagtcaataaactctctacccattcagggcaatatctctcttggatccaaagtgaactctagaaataattttgtttaactttaagaaggagatatacat

SEQ ID NO: 236 - DNA, 43 bp, Artificial Sequence; identical to SEQ ID NO: 211
  Synthetic

SEQ ID NO: 237 - DNA, 6939 bp, Artificial Sequence
  Synthetic
caaataaaacgaaaggctcagtcgaaagactgggcctttcgttttatctgttgtttgtcggtgaacgctctcctgagtaggacaaatccgccgggagcggatttgaacgttgcgaagcaacggcccggagggtggcgggcaggacgcccgccataaactgccaggcatcaaattaagcagaaggccatcctgacggatggcctttttgcgtggccagtgccaagcttgcatgcagattgcagcattacacgtcttgagcgattgtgtaggctggagctgcttcgaagttcctatactttctagagaataggaacttcggaataggaacttcatttaaatggcgcgccttacgccccgccctgccactcatcgcagtactgttgtattcattaagcatctgccgacatggaagccatcacaaacggcatgatgaacctgaatcgccagcggcatcagcaccttgtcgccttgcgtataatatttgcccatggtgaaaacgggggcgaagaagttgtccatattggccacgtttaaatcaaaactggtgaaactcacccagggattggctgagacgaaaaacatattctcaataaaccctttagggaaataggccaggttttcaccgtaacacgccacatcttgcgaatatatgtgtagaaactgccggaaatcgtcgtggtattcactccagagcgatgaaaacgtttcagtttgctcatggaaaacggtgtaacaagggtgaacactatcccatatcaccagctcaccgtctttcattgccatacgtaattccggatgagcattcatcaggcgggcaagaatgtgaataaaggccggataaaacttgtgcttatttttctttacggtctttaaaaaggccgtaatatccagctgaacggtctggttataggtacattgagcaactgactgaaatgcctcaaaatgttctttacgatgccattgggatatatcaacggtggtatatccagtgatttttttctccattttagcttccttagctcctgaaaatctcgacaactcaaaaaatacgcccggtagtgatcttatttcattatggtgaaagttggaacctcttacgtgccgatcaacgtctcattttcgccaaaagttggcccagggcttcccggtatcaacagggacaccaggatttatttattctgcgaagtgatcttccgtcacaggtaggcgcgccgaagttcctatactttctagagaataggaacttcggaataggaactaaggaggatattcatatggaccatggctaattcccaggtaccagttgttcttattggtggtgttgctttatggttgcatcgtagtaaatggttgtaacaaaagcaatttttccggctgtctgtatacaaaaacgccgcaaagtttgagcgaagtcaataaactctctacccattcagggcaatatctctcttggatccaaagtgaactctagaaataattttgtttaactttaagaaggagatatacatatgtctaacgtgcaggagtggcaacagcttgccaacaaggaattgagccgtcgggagaaaactgtcgactcgctggttcatcaaaccgcggaagggatcgccatcaagccgctgtataccgaagccgatctcgataatctggaggtgacaggtacccttcctggtttgccgccctacgttcgtggcccgcgtgccactatgtataccgcccaaccgtggaccatccgtcagtatgctggtttttcaacagcaaaagagtccaacgctttttatcgccgtaacctggccgccgggcaaaaaggtctttccgttgcgtttgaccttgccacccaccgtggctacgactccgataacccgcgcgtggcgggcgacgtcggcaaagcgggcgtcgctatcgacaccgtggaagatatgaaagtcctgttcgaccagatcccgctggataaaatgtcggtttcgatgaccatgaatggcgcagtgctaccagtactggcgttttatatcgtcgccgcagaagagcaaggtgttacacctgataaactgaccggcaccattcaaaacgatattctcaaagagtacctctgccgcaacacctatatttacccaccaaaaccgtcaatgcgcattatcgccgacatcatcgcctggtgttccggcaacatgccgcgatttaataccatcagtatcagcggttaccacatgggtgaagcgggtgccaactgcgtgcagcaggtagcatttacgctcgctgatgggattgagtacatcaaagcagcaatctctgccggactgaaaattgatgacttcgctcctcgcctgtcgttcttcttcggcatcggcatggatctgtttatgaacgtcgccatgttgcgtgcggcacgttatttatggagcgaagcggtcagtggatttggcgcacaggacccgaaatcactggcgctgcgtacccactgccagacctcaggctggagcctgactgaacaggatccgtataacaacgttatccgcaccaccattgaagcgctggctgcgacgctgggcggtactcagtcactgcataccaacgcctttgacgaagcgcttggtttgcctaccgatttctcagcacgcattgcccgcaacacccagatcatcatccaggaagaatcagaactctgccgcaccgtcgatccactggccggatcctattacattgagtcgctgaccgatcaaatcgtcaaacaagccagagctattatccaacagatcgacgaagccggtggcatggcgaaagcgatcgaagcaggtctgccaaaacgaatgatcgaagaggcctcagcgcgcgaacagtcgctgatcgaccagggcaagcgtgtcatcgttggtgtcaacaagtacaaactggatcacgaagacgaaaccgatgtacttgagatcgacaacgtgatggtgcgtaacgagcaaattgcttcgctggaacgcattcgcgccacccgtgatgatgccgccgtaaccgccgcgttgaacgccctgactcacgccgcacagcataacgaaaacctgctggctgccgctgttaatgccgctcgcgttcgcgccaccctgggtgaaatttccgatgcgctggaagtcgctttcgaccgttatctggtgccaagccagtgtgttaccggcgtgattgcgcaaagctatcatcagtctgagaaatcggcctccgagttcgatgccattgttgcgcaaacggagcagttccttgccgacaatggtcgtcgcccgcgcattctgatcgctaagatgggccaggatggacacgatcgcggcgcgaaagtgatcgccagcgcctattccgatctcggtttcgacgtagatttaagcccgatgttctctacacctgaagagatcgcccgcctggccgtagaaaacgacgttcacgtagtgggcgcatcctcactggctgccggtcataaaacgctgatcccggaactggtcgaagcgctgaaaaaatggggacgcgaagatatctgcgtggtcgcgggtggcgtcattccgccgcaggattacgccttcctgcaagagcgcggcgtggcggcgatttatggtccaggtacacctatgctcgacagtgtgcgcgacgtactgaatctgataagccagcatcatgattaatgaagccacgctggcagaaagtattcgccgcttacgtcagggtgagcgtgccacactcgcccaggccatgacgctggtggaaagccgtcacccgcgtcatcaggcactaagtacgcagctgcttgatgccattatgccgtactgcggtaacaccctgcgactgggcgttaccggcacccccggcgcggggaaaagtacctttcttgaggcctttggcatgttgttgattcgagagggattaaaggtcgcggttattgcggtcgatcccagcagcccggtcactggcggtagcattctcggggataaaacccgcatgaatgacctggcgcgtgccgaagcggcgtttattcgcccggtaccatcctccggtcatctgggcggtgccagtcagcgagcgcgggaattaatgctgttatgcgaagcagcgggttatgacgtagtgattgtcgaaacggttggcgtcgggcagtcggaaacagaagtcgcccgcatggtggactgttttatctcgttgcaaattgccggtggcggcgatgatctgcagggcattaaaaaagggctgatggaagtggctgatctgatcgttatcaacaaagacgatggcgataaccataccaatgtcgccattgcccggcatatgtacgagagtgccctgcatattctgcgacgtaaatacgacgaatggcagccacgggttctgacttgtagcgcactggaaaaacgtggaatcgatgagatctggcacgccatcatcgacttcaaaaccgcgctaactgccagtggtcgtttacaacaagtgcggcaacaacaatcggtggaatggctgcgtaagcagaccgaagaagaagtactgaatcacctgttcgcgaatgaagatttcgatcgctattaccgccagacgcttttagcggtcaaaaacaatacgctctcaccgcgcaccggcctgcggcagctcagtgaatttatccagacgcaatattttgattaaaggaatttttatgtcttatcagtatgttaacgttgtcactatcaacaaagtggcggtcattgagtttaactatggccgaaaacttaatgccttaagtaaagtctttattgatgatcttatgcaggcgttaagcgatctcaaccggccggaaattcgctgtatcattttgcgcgcaccgagtggatccaaagtcttctccgcaggtcacgatattcacgaactgccgtctggcggtcgcgatccgctctcctatgatgatccattgcgtcaaatcacccgcatgatccaaaaattcccgaaaccgatcatttcgatggtggaaggtagtgtttggggtggcgcatttgaaatgatcatgagttccgatctgatcatcgccgccagtacctcaaccttctcaatgacgcctgtaaacctcggcgtcccgtataacctggtcggcattcacaacctgacccgcgacgcgggcttccacattgtcaaagagctgatttttaccgcttcgccaatcaccgcccagcgcgcgctggctgtcggcatcctcaaccatgttgtggaagtggaagaactggaagatttcaccttacaaatggcgcaccacatctctgagaaagcgccgttagccattgccgttatcaaagaagagctgcgtgtactgggcgaagcacacaccatgaactccgatgaatttgaacgtattcaggggatgcgccgcgcggtgtatgacagcgaagattaccaggaagggatgaacgctttcctcgaaaaacgtaaacctaatttcgttggtcattaatccctgcgaacgaaggagtaaaaatggaaactcagtggacaaggatgaccgccaatgaagcggcagaaattatccagcataacgacatggtggcatttagcggctttaccccggcgggttcgccgaaagccctacccaccgcgattgcccgcagagctaacgaacagcatgaggccaaaaagccgtatcaaattcgccttctgacgggtgcgtcaatcagcgccgccgctgacgatgtactttctgacgccgatgctgtttcctggcgtgcgccatatcaaacatcgtccggtttacgtaaaaagatcaatcagggcgcggtgagtttcgttgacctgcatttgagcgaagtggcgcaaatggtcaattacggtttcttcggcgacattgatgttgccgtcattgaagcatcggcactggcaccggatggtcgagtctggttaaccagcgggatcggtaatgcgccgacctggctgctgcgggcgaagaaagtgatcattgaactcaatcactatcacgatccgcgcgttgcagaactggcggatattgtgattcctggcgcgccaccgcggcgcaatagcgtgtcgatcttccatgcaatggatcgcgtcggtacccgctatgtgcaaatcgatccgaaaaagattgtcgccgtcgtggaaaccaacttgcccgacgccggtaatatgctggataagcaaaatcccatgtgccagcagattgccgataacgtggtcacgttcttattgcaggaaatggcgcatgggcgtattccgccggaatttctgccgctgcaaagtggcgtgggcaatatcaataatgcggtaatggcgcgtctgggggaaaacccggtaattcctccgtttatgatgtattcggaagtgctacaggaatcggtggtgcatttactggaaaccggcaaaatcagcggggccagcgcctccagcctgacaatctcggccgattccctgcgcaagatttacgacaatatggattactttgccagccgcattgtgttgcgtccgcaggagatttccaataacccggaaatcatccgtcgtctgggcgtcatcgctctgaacgtcggcctggagtttgatatttacgggcatgccaactcaacacacgtagccggggtcgatctgatgaacggcatcggcggcagcggtgattttgaacgcaacgcgtatctgtcgatctttatggccccgtcgattgctaaagaaggcaagatctcaaccgtcgtgccaatgtgcagccatgttgatcacagcgaacacagcgtcaaagtgatcatcaccgaacaagggatcgccgatctgcgcggtctttccccgcttcaacgcgcccgcactatcattgataattgtgcacatcctatgtatcgggattatctgcatcgctatctggaaaatgcgcctggcggacatattcaccacgatcttagccacgtcttcgacttacaccgtaatttaattgcaaccggctcgatgctgggttaa

SEQ ID NO: 238 - DNA, 5638 bp, Artificial Sequence
  Synthetic
agttgttcttattggtggtgttgctttatggttgcatcgtagtaaatggttgtaacaaaagcaatttttccggctgtctgtatacaaaaacgccgcaaagtttgagcgaagtcaataaactctctacccattcagggcaatatctctcttggatccaaagtgaactctagaaataattttgtttaactttaagaaggagatatacatatgtctaacgtgcaggagtggcaacagcttgccaacaaggaattgagccgtcgggagaaaactgtcgactcgctggttcatcaaaccgcggaagggatcgccatcaagccgctgtataccgaagccgatctcgataatctggaggtgacaggtacccttcctggtttgccgccctacgttcgtggcccgcgtgccactatgtataccgcccaaccgtggaccatccgtcagtatgctggtttttcaacagcaaaagagtccaacgctttttatcgccgtaacctggccgccgggcaaaaaggtctttccgttgcgtttgaccttgccacccaccgtggctacgactccgataacccgcgcgtggcgggcgacgtcggcaaagcgggcgtcgctatcgacaccgtggaagatatgaaagtcctgttcgaccagatcccgctggataaaatgtcggtttcgatgaccatgaatggcgcagtgctaccagtactggcgttttatatcgtcgccgcagaagagcaaggtgttacacctgataaactgaccggcaccattcaaaacgatattctcaaagagtacctctgccgcaacacctatatttacccaccaaaaccgtcaatgcgcattatcgccgacatcatcgcctggtgttccggcaacatgccgcgatttaataccatcagtatcagcggttaccacatgggtgaagcgggtgccaactgcgtgcagcaggtagcatttacgctcgctgatgggattgagtacatcaaagcagcaatctctgccggactgaaaattgatgacttcgctcctcgcctgtcgttcttcttcggcatcggcatggatctgtttatgaacgtcgccatgttgcgtgcggcacgttatttatggagcgaagcggtcagtggatttggcgcacaggacccgaaatcactggcgctgcgtacccactgccagacctcaggctggagcctgactgaacaggatccgtataacaacgttatccgcaccaccattgaagcgctggctgcgacgctgggcggtactcagtcactgcataccaacgcctttgacgaagcgcttggtttgcctaccgatttctcagcacgcattgcccgcaacacccagatcatcatccaggaagaatcagaactctgccgcaccgtcgatccactggccggatcctattacattgagtcgctgaccgatcaaatcgtcaaacaagccagagctattatccaacagatcgacgaagccggtggcatggcgaaagcgatcgaagcaggtctgccaaaacgaatgatcgaagaggcctcagcgcgcgaacagtcgctgatcgaccagggcaagcgtgtcatcgttggtgtcaacaagtacaaactggatcacgaagacgaaaccgatgtacttgagatcgacaacgtgatggtgcgtaacgagcaaattgcttcgctggaacgcattcgcgccacccgtgatgatgccgccgtaaccgccgcgttgaacgccctgactcacgccgcacagcataacgaaaacctgctggctgccgctgttaatgccgctcgcgttcgcgccaccctgggtgaaatttccgatgcgctggaagtcgctttcgaccgttatctggtgccaagccagtgtgttaccggcgtgattgcgcaaagctatcatcagtctgagaaatcggcctccgagttcgatgccattgttgcgcaaacggagcagttccttgccgacaatggtcgtcgcccgcgcattctgatcgctaagatgggccaggatggacacgatcgcggcgcgaaagtgatcgccagcgcctattccgatctcggtttcgacgtagatttaagcccgatgttctctacacctgaagagatcgcccgcctggccgtagaaaacgacgttcacgtagtgggcgcatcctcactggctgccggtcataaaacgctgatcccggaactggtcgaagcgctgaaaaaatggggacgcgaagatatctgcgtggtcgcgggtggcgtcattccgccgcaggattacgccttcctgcaagagcgcggcgtggcggcgatttatggtccaggtacacctatgctcgacagtgtgcgcgacgtactgaatctgataagccagcatcatgattaatgaagccacgctggcagaaagtattcgccgcttacgtcagggtgagcgtgccacactcgcccaggccatgacgctggtggaaagccgtcacccgcgtcatcaggcactaagtacgcagctgcttgatgccattatgccgtactgcggtaacaccctgcgactgggcgttaccggcacccccggcgcggggaaaagtacctttcttgaggcctttggcatgttgttgattcgagagggattaaaggtcgcggttattgcggtcgatcccagcagcccggtcactggcggtagcattctcggggataaaacccgcatgaatgacctggcgcgtgccgaagcggcgtttattcgcccggtaccatcctccggtcatctgggcggtgccagtcagcgagcgcgggaattaatgctgttatgcgaagcagcgggttatgacgtagtgattgtcgaaacggttggcgtcgggcagtcggaaacagaagtcgcccgcatggtggactgttttatctcgttgcaaattgccggtggcggcgatgatctgcagggcattaaaaaagggctgatggaagtggctgatctgatcgttatcaacaaagacgatggcgataaccataccaatgtcgccattgcccggcatatgtacgagagtgccctgcatattctgcgacgtaaatacgacgaatggcagccacgggttctgacttgtagcgcactggaaaaacgtggaatcgatgagatctggcacgccatcatcgacttcaaaaccgcgctaactgccagtggtcgtttacaacaagtgcggcaacaacaatcggtggaatggctgcgtaagcagaccgaagaagaagtactgaatcacctgttcgcgaatgaagatttcgatcgctattaccgccagacgcttttagcggtcaaaaacaatacgctctcaccgcgcaccggcctgcggcagctcagtgaatttatccagacgcaatattttgattaaaggaatttttatgtcttatcagtatgttaacgttgtcactatcaacaaagtggcggtcattgagtttaactatggccgaaaacttaatgccttaagtaaagtctttattgatgatcttatgcaggcgttaagcgatctcaaccggccggaaattcgctgtatcattttgcgcgcaccgagtggatccaaagtcttctccgcaggtcacgatattcacgaactgccgtctggcggtcgcgatccgctctcctatgatgatccattgcgtcaaatcacccgcatgatccaaaaattcccgaaaccgatcatttcgatggtggaaggtagtgtttggggtggcgcatttgaaatgatcatgagttccgatctgatcatcgccgccagtacctcaaccttctcaatgacgcctgtaaacctcggcgtcccgtataacctggtcggcattcacaacctgacccgcgacgcgggcttccacattgtcaaagagctgatttttaccgcttcgccaatcaccgcccagcgcgcgctggctgtcggcatcctcaaccatgttgtggaagtggaagaactggaagatttcaccttacaaatggcgcaccacatctctgagaaagcgccgttagccattgccgttatcaaagaagagctgcgtgtactgggcgaagcacacaccatgaactccgatgaatttgaacgtattcaggggatgcgccgcgcggtgtatgacagcgaagattaccaggaagggatgaacgctttcctcgaaaaacgtaaacctaatttcgttggtcattaatccctgcgaacgaaggagtaaaaatggaaactcagtggacaaggatgaccgccaatgaagcggcagaaattatccagcataacgacatggtggcatttagcggctttaccccggcgggttcgccgaaagccctacccaccgcgattgcccgcagagctaacgaacagcatgaggccaaaaagccgtatcaaattcgccttctgacgggtgcgtcaatcagcgccgccgctgacgatgtactttctgacgccgatgctgtttcctggcgtgcgccatatcaaacatcgtccggtttacgtaaaaagatcaatcagggcgcggtgagtttcgttgacctgcatttgagcgaagtggcgcaaatggtcaattacggtttcttcggcgacattgatgttgccgtcattgaagcatcggcactggcaccggatggtcgagtctggttaaccagcgggatcggtaatgcgccgacctggctgctgcgggcgaagaaagtgatcattgaactcaatcactatcacgatccgcgcgttgcagaactggcggatattgtgattcctggcgcgccaccgcggcgcaatagcgtgtcgatcttccatgcaatggatcgcgtcggtacccgctatgtgcaaatcgatccgaaaaagattgtcgccgtcgtggaaaccaacttgcccgacgccggtaatatgctggataagcaaaatcccatgtgccagcagattgccgataacgtggtcacgttcttattgcaggaaatggcgcatgggcgtattccgccggaatttctgccgctgcaaagtggcgtgggcaatatcaataatgcggtaatggcgcgtctgggggaaaacccggtaattcctccgtttatgatgtattcggaagtgctacaggaatcggtggtgcatttactggaaaccggcaaaatcagcggggccagcgcctccagcctgacaatctcggccgattccctgcgcaagatttacgacaatatggattactttgccagccgcattgtgttgcgtccgcaggagatttccaataacccggaaatcatccgtcgtctgggcgtcatcgctctgaacgtcggcctggagtttgatatttacgggcatgccaactcaacacacgtagccggggtcgatctgatgaacggcatcggcggcagcggtgattttgaacgcaacgcgtatctgtcgatctttatggccccgtcgattgctaaagaaggcaagatctcaaccgtcgtgccaatgtgcagccatgttgatcacagcgaacacagcgtcaaagtgatcatcaccgaacaagggatcgccgatctgcgcggtctttccccgcttcaacgcgcccgcactatcattgataattgtgcacatcctatgtatcgggattatctgcatcgctatctggaaaatgcgcctggcggacatattcaccacgatcttagccacgtcttcgacttacaccgtaatttaattgcaaccggctcgatgctgggttaa

SEQ ID NO: 239 - DNA, 8698 bp, Artificial Sequence
  Synthetic
ttaagacccactttcacatttaagttgtttttctaatccgcatatgatcaattcaaggccgaataagaaggctggctctgcaccttggtgatcaaataattcgatagcttgtcgtaataatggcggcatactatcagtagtaggtgtttccctttcttctttagcgacttgatgctcttgatcttccaatacgcaacctaaagtaaaatgccccacagcgctgagtgcatataatgcattctctagtgaaaaaccttgttggcataaaaaggctaattgattttcgagagtttcatactgtttttctgtaggccgtgtacctaaatgtacttttgctccatcgcgatgacttagtaaagcacatctaaaacttttagcgttattacgtaaaaaatcttgccagctttccccttctaaagggcaaaagtgagtatggtgcctatctaacatctcaatggctaaggcgtcgagcaaagcccgcttattttttacatgccaatacaatgtaggctgctctacacctagcttctgggcgagtttacgggttgttaaaccttcgattccgacctcattaagcagctctaatgcgctgttaatcactttacttttatctaatctagacatcattaattcctaatttttgttgacactctatcattgatagagttattttaccactccctatcagtgatagagaaaagtgaactctagaaataattttgtttaactttaagaaggagatatacatatgcgcaaagtgccgattatcacggctgacgaggccgcaaaactgatcaaggacggcgacaccgtgacaactagcggctttgtgggtaacgcgatccctgaggcccttgaccgtgcagtcgaaaagcgtttcctggaaacgggcgaaccgaagaacattacttatgtatattgcggcagtcagggcaatcgcgacggtcgtggcgcagaacatttcgcgcatgaaggcctgctgaaacgttatatcgctggccattgggcgaccgtcccggcgttagggaaaatggccatggagaataaaatggaggcctacaatgtctctcagggcgccttgtgtcatctctttcgcgatattgcgagccataaaccgggtgtgttcacgaaagtaggaatcggcaccttcattgatccacgtaacggtggtgggaaggtcaacgatattaccaaggaagatatcgtagaactggtggaaattaaagggcaggaatacctgttttatccggcgttcccgatccatgtcgcgctgattcgtggcacctatgcggacgagagtggtaacatcacctttgaaaaagaggtagcgcctttggaagggacttctgtctgtcaagcggtgaagaactcgggtggcattgtcgtggttcaggttgagcgtgtcgtcaaagcaggcacgctggatccgcgccatgtgaaagttccgggtatctatgtagattacgtagtcgtcgcggatccggaggaccatcaacagtcccttgactgcgaatatgatcctgcccttagtggagagcaccgtcgtccggaggtggtgggtgaaccactgcctttatccgcgaagaaagtcatcggccgccgtggcgcgattgagctcgagaaagacgttgcagtgaaccttggggtaggtgcacctgagtatgtggcctccgtggccgatgaagaaggcattgtggattttatgactctcacagcggagtccggcgctatcggtggcgttccagccggcggtgttcgctttggggcgagctacaatgctgacgccttgatcgaccagggctaccaatttgattattacgacggtgggggtctggatctttgttacctgggtttagctgaatgcgacgaaaagggtaatatcaatgttagccgcttcggtcctcgtatcgctgggtgcggcggattcattaacattacccaaaacacgccgaaagtcttcttttgtgggacctttacagccggggggctgaaagtgaaaattgaagatggtaaggtgattatcgttcaggaagggaaacagaagaaattccttaaggcagtggagcaaatcacctttaatggagacgtggccttagcgaacaagcaacaagttacctacatcacggagcgttgcgtcttcctcctcaaagaagacggtttacacctttcggaaatcgcgccaggcatcgatctgcagacccagattttggatgttatggactttgccccgatcattgatcgtgacgcaaacgggcagattaaactgatggacgcggcgttattcgcagaagggctgatgggcttgaaagaaatgaagtcttgataagaaggagatatacatatgagcttaacccaaggcatgaaagctaaacaactgttagcatactttcagggtaaagccgatcaggatgcacgtgaagcgaaagcccgcggtgagctggtctgctggtcggcgtcagtcgcgccgccggaattttgcgtaacaatgggcattgccatgatctacccggagactcatgcagcgggcatcggtgcccgcaaaggtgcgatggacatgctggaagttgcggaccgcaaaggctacaacgtggattgttgttcctacggccgtgtaaatatgggttacatggaatgtttaaaagaagccgccatcacgggcgtcaagccggaagttttggttaattcccctgctgctgacgttccgcttcccgatttggtgattacgtgtaataatatctgtaacacgctgctgaaatggtacgaaaacttagcagcagaactcgatattccttgcatcgtgatcgacgtaccgtttaatcataccatgccgattccggaatatgccaaggcctacatcgcggaccagttccgcaatgcaatttctcagctggaagttatttgtggccgtccgttcgattggaagaaatttaaggaggtcaaagatcagacccagcgtagcgtataccactggaaccgcattgccgagatggcgaaatacaagcctagcccgctgaacggcttcgatctgttcaattacatggcgttaatcgtggcgtgccgcagcctggattatgcagaaattacctttaaagcgttcgcggacgaattagaagagaatttgaaggcgggtatctacgcctttaaaggtgcggaaaaaacgcgctttcaatgggaaggtatcgcggtgtggccacatttaggtcacacgtttaaatctatgaagaatctgaattcgattatgaccggtacggcataccccgccctttgggacctgcactatgacgctaacgacgaatctatgcactctatggctgaagcgtacacccgtatttatattaatacttgtctgcagaacaaagtagaggtcctgcttgggatcatggaaaaaggccaggtggatggtaccgtatatcatctgaatcgcagctgcaaactgatgagtttcctgaacgtggaaacggctgaaattattaaagagaagaacggtcttccttacgtctccattgatggcgatcagaccgatcctcgcgttttttctccggcccagtttgatacccgtgttcaggccctggttgagatgatggaggccaatatggcggcagcggaataataagaaggagatatacatatgtcacgcgtggaggcaatcctgtcgcagctgaaagatgtcgccgcgaatccgaaaaaagccatggatgactataaagctgaaacaggtaagggcgcggttggtatcatgccgatctacagccccgaagaaatggtacacgccgctggctatttgccgatgggaatctggggcgcccagggcaaaacgattagtaaagcgcgcacctatctgcctgcttttgcctgcagcgtaatgcagcaggttatggaattacagtgcgagggcgcgtatgatgacctgtccgcagttatttttagcgtaccgtgcgacactctcaaatgtcttagccagaaatggaaaggtacgtccccagtgattgtatttacgcatccgcagaaccgcggattagaagcggcgaaccaattcttggttaccgagtatgaactggtaaaagcacaactggaatcagttctgggtgtgaaaatttcaaacgccgccctggaaaattcgattgcaatttataacgagaatcgtgccgtgatgcgtgagttcgtgaaagtggcagcggactatcctcaagtcattgacgcagtgagccgccacgcggtttttaaagcgcgccagtttatgcttaaggaaaaacataccgcacttgtgaaagaactgatcgctgagattaaagcaacgccagtccagccgtgggacggaaaaaaggttgtagtgacgggcattctgttggaaccgaatgagttattagatatctttaatgagtttaagatcgcgattgttgatgatgatttagcgcaggaaagccgtcagatccgtgttgacgttctggacggagaaggcggaccgctctaccgtatggctaaagcgtggcagcaaatgtatggctgctcgctggcaaccgacaccaagaagggtcgcggccgtatgttaattaacaaaacgattcagaccggtgcggacgctatcgtagttgcaatgatgaagttttgcgacccagaagaatgggattatccggtaatgtaccgtgaatttgaagaaaaaggggtcaaatcacttatgattgaggtggatcaggaagtatcgtctttcgaacagattaaaacccgtctgcagtcattcgtcgaaatgctttaataagaaggagatatacatatgtataccttggggattgatgtcggttctgcctctagtaaagcggtgattctgaaagatggaaaagatattgtcgctgccgaggttgtccaagtcggtaccggctcctcgggtccccaacgcgcactggacaaagcctttgaagtctctggcttaaaaaaggaagacatcagctacacagtagctacgggctatgggcgcttcaattttagcgacgcggataaacagatttcggaaattagctgtcatgccaaaggcatttatttcttagtaccaactgcgcgcactattattgacattggcggccaagatgcgaaagccatccgcctggacgacaaggggggtattaagcaattcttcatgaatgataaatgcgcggcgggcacggggcgtttcctggaagtcatggctcgcgtacttgaaaccaccctggatgaaatggctgaactggatgaacaggcgactgacaccgctcccatttcaagcacctgcacggttttcgccgaaagcgaagtaattagccaattgagcaatggtgtctcacgcaacaacatcattaaaggtgtccatctgagcgttgcgtcacgtgcgtgtggtctggcgtatcgcggcggtttggagaaagatgttgttatgacaggtggcgtggcaaaaaatgcaggggtggtgcgcgcggtggcgggcgttctgaagaccgatgttatcgttgctccgaatcctcagacgaccggtgcactgggggcagcgctgtatgcttatgaggccgcccagaagaagtaataagaaggagatatacatatggccttcaatagcgcagatattaattctttccgcgatatttgggtgttttgtgaacagcgtgagggcaaactgattaacaccgatttcgaattaattagcgaaggtcgtaaactggctgacgaacgcggaagcaaactggttggaattttgctggggcacgaagttgaagaaatcgcaaaagaattaggcggctatggtgcggacaaggtaattgtgtgcgatcatccggaacttaaattttacactacggatgcttatgccaaagttttatgtgacgtcgtgatggaagagaaaccggaggtaattttgatcggtgccaccaacattggccgtgatctcggaccgcgttgtgctgcacgcttgcacacggggctgacggctgattgcacgcacctggatattgatatgaataaatatgtggactttcttagcaccagtagcaccttggatatctcgtcgatgactttccctatggaagatacaaaccttaaaatgacgcgccctgcatttggcggacatctgatggcaacgatcatttgtccacgcttccgtccctgtatgagcacagtgcgccccggagtgatgaagaaagcggagttctcgcaggagatggcgcaagcatgtcaagtagtgacccgtcacgtaaatttgtcggatgaagaccttaaaactaaagtaattaatatcgtgaaggaaacgaaaaagattgtggatctgatcggcgcagaaattattgtgtcagttggtcgtggtatctcgaaagatgtccaaggtggaattgcactggctgaaaaacttgcggacgcatttggtaacggtgtcgtgggcggctcgcgcgcagtgattgattccggctggttacctgcggatcatcaggttggacaaaccggtaagaccgtgcacccgaaagtctacgtggcgctgggtattagtggggctatccagcataaggctgggatgcaagactctgaactgatcattgccgtcaacaaagacgaaacggcgcctatcttcgactgcgccgattatggcatcaccggtgatttatttaaaatcgtaccgatgatgatcgacgcgatcaaagagggtaaaaacgcatgataagaaggagatatacatatgcgcatctatgtgtgtgtgaaacaagtcccagatacgagcggcaaggtggccgttaaccctgatgggacccttaaccgtgcctcaatggcagcgattattaacccggacgatatgtccgcgatcgaacaggcattaaaactgaaagatgaaaccggatgccaggttacggcgcttacgatgggtcctcctcctgccgagggcatgttgcgcgaaattattgcaatgggggccgacgatggtgtgctgatttcggcccgtgaatttggggggtccgataccttcgcaaccagtcaaattattagcgcggcaatccataaattaggcttaagcaatgaagacatgatcttttgcggtcgtcaggccattgacggtgatacggcccaagtcggccctcaaattgccgaaaaactgagcatcccacaggtaacctatggcgcaggaatcaaaaaatctggtgatttagtgctggtgaagcgtatgttggaggatggttatatgatgatcgaagtcgaaactccatgtctgattacctgcattcaggataaagcggtaaaaccacgttacatgactctcaacggtattatggaatgctactccaagccgctcctcgttctcgattacgaagcactgaaagatgaaccgctgatcgaacttgataccattgggcttaaaggctccccgacgaatatctttaaatcgtttacgccgcctcagaaaggcgttggtgtcatgctccaaggcaccgataaggaaaaagtcgaggatctggtggataagctgatgcagaaacatgtcatctaataagaaggagatatacatatgttcttactgaagattaaaaaagaacgtatgaaacgcatggactttagtttaacgcgtgaacaggagatgttaaaaaaactggcgcgtcagtttgctgagatcgagctggaaccggtggccgaagagattgatcgtgagcacgtttttcctgcagaaaactttaagaagatggcggaaattggcttaaccggcattggtatcccgaaagaatttggtggctccggtggaggcaccctggagaaggtcattgccgtgtcagaattcggcaaaaagtgtatggcctcagcttccattttaagcattcatcttatcgcgccgcaggcaatctacaaatatgggaccaaagaacagaaagagacgtacctgccgcgtcttaccaaaggtggtgaactgggcgcctttgcgctgacagaaccaaacgccggaagcgatgccggcgcggtaaaaacgaccgcgattctggacagccagacaaacgagtacgtgctgaatggcaccaaatgctttatcagcgggggcgggcgcgcgggtgttcttgtaatttttgcgcttactgaaccgaaaaaaggtctgaaagggatgagcgcgattatcgtggagaaagggaccccgggcttcagcatcggcaaggtggagagcaagatggggatcgcaggttcggaaaccgcggaacttatcttcgaagattgtcgcgttccggctgccaaccttttaggtaaagaaggcaaaggctttaaaattgctatggaagccctggatggcgcccgtattggcgtgggcgctcaagcaatcggaattgccgagggggcgatcgacctgagtgtgaagtacgttcacgagcgcattcaatttggtaaaccgatcgcgaatctgcagggaattcaatggtatatcgcggatatggcgaccaaaaccgccgcggcacgcgcacttgttgagtttgcagcgtatcttgaagacgcgggtaaaccgttcacaaaggaatctgctatgtgcaagctgaacgcctccgaaaacgcgcgttttgtgacaaatttagctctgcagattcacgggggttacggttatatgaaagattatccgttagagcgtatgtatcgcgatgctaagattacggaaatttacgaggggacatcagaaatccataaggtggtgattgcgcgtgaagtaatgaaacgctaa

SEQ ID NO: 240 - DNA, 7950 bp, Artificial Sequence
  Synthetic
atgcgcaaagtgccgattatcacggctgacgaggccgcaaaactgatcaaggacggcgacaccgtgacaactagcggctttgtgggtaacgcgatccctgaggcccttgaccgtgcagtcgaaaagcgtttcctggaaacgggcgaaccgaagaacattacttatgtatattgcggcagtcagggcaatcgcgacggtcgtggcgcagaacatttcgcgcatgaaggcctgctgaaacgttatatcgctggccattgggcgaccgtcccggcgttagggaaaatggccatggagaataaaatggaggcctacaatgtctctcagggcgccttgtgtcatctctttcgcgatattgcgagccataaaccgggtgtgttcacgaaagtaggaatcggcaccttcattgatccacgtaacggtggtgggaaggtcaacgatattaccaaggaagatatcgtagaactggtggaaattaaagggcaggaatacctgttttatccggcgttcccgatccatgtcgcgctgattcgtggcacctatgcggacgagagtggtaacatcacctttgaaaaagaggtagcgcctttggaagggacttctgtctgtcaagcggtgaagaactcgggtggcattgtcgtggttcaggttgagcgtgtcgtcaaagcaggcacgctggatccgcgccatgtgaaagttccgggtatctatgtagattacgtagtcgtcgcggatccggaggaccatcaacagtcccttgactgcgaatatgatcctgcccttagtggagagcaccgtcgtccggaggtggtgggtgaaccactgcctttatccgcgaagaaagtcatcggccgccgtggcgcgattgagctcgagaaagacgttgcagtgaaccttggggtaggtgcacctgagtatgtggcctccgtggccgatgaagaaggcattgtggattttatgactctcacagcggagtccggcgctatcggtggcgttccagccggcggtgttcgctttggggcgagctacaatgctgacgccttgatcgaccagggctaccaatttgattattacgacggtgggggtctggatctttgttacctgggtttagctgaatgcgacgaaaagggtaatatcaatgttagccgcttcggtcctcgtatcgctgggtgcggcggattcattaacattacccaaaacacgccgaaagtcttcttttgtgggacctttacagccggggggctgaaagtgaaaattgaagatggtaaggtgattatcgttcaggaagggaaacagaagaaattccttaaggcagtggagcaaatcacctttaatggagacgtggccttagcgaacaagcaacaagttacctacatcacggagcgttgcgtcttcctcctcaaagaagacggtttacacctttcggaaatcgcgccaggcatcgatctgcagacccagattttggatgttatggactttgccccgatcattgatcgtgacgcaaacgggcagattaaactgatggacgcggcgttattcgcagaagggctgatgggcttgaaagaaatgaagtcttgataagaaggagatatacatatgagcttaacccaaggcatgaaagctaaacaactgttagcatactttcagggtaaagccgatcaggatgcacgtgaagcgaaagcccgcggtgagctggtctgctggtcggcgtcagtcgcgccgccggaattttgcgtaacaatgggcattgccatgatctacccggagactcatgcagcgggcatcggtgcccgcaaaggtgcgatggacatgctggaagttgcggaccgcaaaggctacaacgtggattgttgttcctacggccgtgtaaatatgggttacatggaatgtttaaaagaagccgccatcacgggcgtcaagccggaagttttggttaattcccctgctgctgacgttccgcttcccgatttggtgattacgtgtaataatatctgtaacacgctgctgaaatggtacgaaaacttagcagcagaactcgatattccttgcatcgtgatcgacgtaccgtttaatcataccatgccgattccggaatatgccaaggcctacatcgcggaccagttccgcaatgcaatttctcagctggaagttatttgtggccgtccgttcgattggaagaaatttaaggaggtcaaagatcagacccagcgtagcgtataccactggaaccgcattgccgagatggcgaaatacaagcctagcccgctgaacggcttcgatctgttcaattacatggcgttaatcgtggcgtgccgcagcctggattatgcagaaattacctttaaagcgttcgcggacgaattagaagagaatttgaaggcgggtatctacgcctttaaaggtgcggaaaaaacgcgctttcaatgggaaggtatcgcggtgtggccacatttaggtcacacgtttaaatctatgaagaatctgaattcgattatgaccggtacggcataccccgccctttgggacctgcactatgacgctaacgacgaatctatgcactctatggctgaagcgtacacccgtatttatattaatacttgtctgcagaacaaagtagaggtcctgcttgggatcatggaaaaaggccaggtggatggtaccgtatatcatctgaatcgcagctgcaaactgatgagtttcctgaacgtggaaacggctgaaattattaaagagaagaacggtcttccttacgtctccattgatggcgatcagaccgatcctcgcgttttttctccggcccagtttgatacccgtgttcaggccctggttgagatgatggaggccaatatggcggcagcggaataataagaaggagatatacatatgtcacgcgtggaggcaatcctgtcgcagctgaaagatgtcgccgcgaatccgaaaaaagccatggatgactataaagctgaaacaggtaagggcgcggttggtatcatgccgatctacagccccgaagaaatggtacacgccgctggctatttgccgatgggaatctggggcgcccagggcaaaacgattagtaaagcgcgcacctatctgcctgcttttgcctgcagcgtaatgcagcaggttatggaattacagtgcgagggcgcgtatgatgacctgtccgcagttatttttagcgtaccgtgcgacactctcaaatgtcttagccagaaatggaaaggtacgtccccagtgattgtatttacgcatccgcagaaccgcggattagaagcggcgaaccaattcttggttaccgagtatgaactggtaaaagcacaactggaatcagttctgggtgtgaaaatttcaaacgccgccctggaaaattcgattgcaatttataacgagaatcgtgccgtgatgcgtgagttcgtgaaagtggcagcggactatcctcaagtcattgacgcagtgagccgccacgcggtttttaaagcgcgccagtttatgcttaaggaaaaacataccgcacttgtgaaagaactgatcgctgagattaaagcaacgccagtccagccgtgggacggaaaaaaggttgtagtgacgggcattctgttggaaccgaatgagttattagatatctttaatgagtttaagatcgcgattgttgatgatgatttagcgcaggaaagccgtcagatccgtgttgacgttctggacggagaaggcggaccgctctaccgtatggctaaagcgtggcagcaaatgtatggctgctcgctggcaaccgacaccaagaagggtcgcggccgtatgttaattaacaaaacgattcagaccggtgcggacgctatcgtagttgcaatgatgaagttttgcgacccagaagaatgggattatccggtaatgtaccgtgaatttgaagaaaaaggggtcaaatcacttatgattgaggtggatcaggaagtatcgtctttcgaacagattaaaacccgtctgcagtcattcgtcgaaatgctttaataagaaggagatatacatatgtataccttggggattgatgtcggttctgcctctagtaaagcggtgattctgaaagatggaaaagatattgtcgctgccgaggttgtccaagtcggtaccggctcctcgggtccccaacgcgcactggacaaagcctttgaagtctctggcttaaaaaaggaagacatcagctacacagtagctacgggctatgggcgcttcaattttagcgacgcggataaacagatttcggaaattagctgtcatgccaaaggcatttatttcttagtaccaactgcgcgcactattattgacattggcggccaagatgcgaaagccatccgcctggacgacaaggggggtattaagcaattcttcatgaatgataaatgcgcggcgggcacggggcgtttcctggaagtcatggctcgcgtacttgaaaccaccctggatgaaatggctgaactggatgaacaggcgactgacaccgctcccatttcaagcacctgcacggttttcgccgaaagcgaagtaattagccaattgagcaatggtgtctcacgcaacaacatcattaaaggtgtccatctgagcgttgcgtcacgtgcgtgtggtctggcgtatcgcggcggtttggagaaagatgttgttatgacaggtggcgtggcaaaaaatgcaggggtggtgcgcgcggtggcgggcgttctgaagaccgatgttatcgttgctccgaatcctcagacgaccggtgcactgggggcagcgctgtatgcttatgaggccgcccagaagaagtaataagaaggagatatacatatggccttcaatagcgcagatattaattctttccgcgatatttgggtgttttgtgaacagcgtgagggcaaactgattaacaccgatttcgaattaattagcgaaggtcgtaaactggctgacgaacgcggaagcaaactggttggaattttgctggggcacgaagttgaagaaatcgcaaaagaattaggcggctatggtgcggacaaggtaattgtgtgcgatcatccggaacttaaattttacactacggatgcttatgccaaagttttatgtgacgtcgtgatggaagagaaaccggaggtaattttgatcggtgccaccaacattggccgtgatctcggaccgcgttgtgctgcacgcttgcacacggggctgacggctgattgcacgcacctggatattgatatgaataaatatgtggactttcttagcaccagtagcaccttggatatctcgtcgatgactttccctatggaagatacaaaccttaaaatgacgcgccctgcatttggcggacatctgatggcaacgatcatttgtccacgcttccgtccctgtatgagcacagtgcgccccggagtgatgaagaaagcggagttctcgcaggagatggcgcaagcatgtcaagtagtgacccgtcacgtaaatttgtcggatgaagaccttaaaactaaagtaattaatatcgtgaaggaaacgaaaaagattgtggatctgatcggcgcagaaattattgtgtcagttggtcgtggtatctcgaaagatgtccaaggtggaattgcactggctgaaaaacttgcggacgcatttggtaacggtgtcgtgggcggctcgcgcgcagtgattgattccggctggttacctgcggatcatcaggttggacaaaccggtaagaccgtgcacccgaaagtctacgtggcgctgggtattagtggggctatccagcataaggctgggatgcaagactctgaactgatcattgccgtcaacaaagacgaaacggcgcctatcttcgactgcgccgattatggcatcaccggtgatttatttaaaatcgtaccgatgatgatcgacgcgatcaaagagggtaaaaacgcatgataagaaggagatatacatatgcgcatctatgtgtgtgtgaaacaagtcccagatacgagcggcaaggtggccgttaaccctgatgggacccttaaccgtgcctcaatggcagcgattattaacccggacgatatgtccgcgatcgaacaggcattaaaactgaaagatgaaaccggatgccaggttacggcgcttacgatgggtcctcctcctgccgagggcatgttgcgcgaaattattgcaatgggggccgacgatggtgtgctgatttcggcccgtgaatttggggggtccgataccttcgcaaccagtcaaattattagcgcggcaatccataaattaggcttaagcaatgaagacatgatcttttgcggtcgtcaggccattgacggtgatacggcccaagtcggccctcaaattgccgaaaaactgagcatcccacaggtaacctatggcgcaggaatcaaaaaatctggtgatttagtgctggtgaagcgtatgttggaggatggttatatgatgatcgaagtcgaaactccatgtctgattacctgcattcaggataaagcggtaaaaccacgttacatgactctcaacggtattatggaatgctactccaagccgctcctcgttctcgattacgaagcactgaaagatgaaccgctgatcgaacttgataccattgggcttaaaggctccccgacgaatatctttaaatcgtttacgccgcctcagaaaggcgttggtgtcatgctccaaggcaccgataaggaaaaagtcgaggatctggtggataagctgatgcagaaacatgtcatctaataagaaggagatatacatatgttcttactgaagattaaaaaagaacgtatgaaacgcatggactttagtttaacgcgtgaacaggagatgttaaaaaaactggcgcgtcagtttgctgagatcgagctggaaccggtggccgaagagattgatcgtgagcacgtttttcctgcagaaaactttaagaagatggcggaaattggcttaaccggcattggtatcccgaaagaatttggtggctccggtggaggcaccctggagaaggtcattgccgtgtcagaattcggcaaaaagtgtatggcctcagcttccattttaagcattcatcttatcgcgccgcaggcaatctacaaatatgggaccaaagaacagaaagagacgtacctgccgcgtcttaccaaaggtggtgaactgggcgcctttgcgctgacagaaccaaacgccggaagcgatgccggcgcggtaaaaacgaccgcgattctggacagccagacaaacgagtacgtgctgaatggcaccaaatgctttatcagcgggggcgggcgcgcgggtgttcttgtaatttttgcgcttactgaaccgaaaaaaggtctgaaagggatgagcgcgattatcgtggagaaagggaccccgggcttcagcatcggcaaggtggagagcaagatggggatcgcaggttcggaaaccgcggaacttatcttcgaagattgtcgcgttccggctgccaaccttttaggtaaagaaggcaaaggctttaaaattgctatggaagccctggatggcgcccgtattggcgtgggcgctcaagcaatcggaattgccgagggggcgatcgacctgagtgtgaagtacgttcacgagcgcattcaatttggtaaaccgatcgcgaatctgcagggaattcaatggtatatcgcggatatggcgaccaaaaccgccgcggcacgcgcacttgttgagtttgcagcgtatcttgaagacgcgggtaaaccgttcacaaaggaatctgctatgtgcaagctgaacgcctccgaaaacgcgcgttttgtgacaaatttagctctgcagattcacgggggttacggttatatgaaagattatccgttagagcgtatgtatcgcgatgctaagattacggaaatttacgaggggacatcagaaatccataaggtggtgattgcgcgtgaagtaatgaaacgctaa

SEQ ID NO: 241 - DNA, 7012 bp, Artificial Sequence
  Synthetic
caactgttgggaagggcgatcggtgcgggcctcttcgctattacgccagctggcgaaagggggatgtgctgcaaggcgattaagttgggtaacgccagggttttcccagtcacgacgttgtaaaacgacggccagtgaattgacgcgtattgggatgtaaaacgacggccagtgaattcgttaagacccactttcacatttaagttgtttttctaatccgcatatgatcaattcaaggccgaataagaaggctggctctgcaccttggtgatcaaataattcgatagcttgtcgtaataatggcggcatactatcagtagtaggtgtttccctttcttctttagcgacttgatgctcttgatcttccaatacgcaacctaaagtaaaatgccccacagcgctgagtgcatataatgcattctctagtgaaaaaccttgttggcataaaaaggctaattgattttcgagagtttcatactgtttttctgtaggccgtgtacctaaatgtacttttgctccatcgcgatgacttagtaaagcacatctaaaacttttagcgttattacgtaaaaaatcttgccagctttccccttctaaagggcaaaagtgagtatggtgcctatctaacatctcaatggctaaggcgtcgagcaaagcccgcttattttttacatgccaatacaatgtaggctgctctacacctagcttctgggcgagtttacgggttgttaaaccttcgattccgacctcattaagcagctctaatgcgctgttaatcactttacttttatctaatctagacatcattaattcctaatttttgttgacactctatcattgatagagttattttaccactccctatcagtgatagagaaaagtgaactctagaaataattttgtttaactttaagaaggagatatacatatgcgtgcggtactgatcgagaagtccgatgatacacagtccgtctctgtcaccgaactggctgaagatcaactgccggaaggcgacgttttggtagatgttgcttattcaacactgaactacaaagacgccctggcaattaccggtaaagcccccgtcgttcgtcgttttccgatggtacctggaatcgactttacgggtaccgtggcccagtcttcccacgccgacttcaagccaggtgatcgcgtaatcctgaatggttggggtgtgggggaaaaacattggggcggtttagcggagcgcgctcgcgtgcgcggagactggcttgttcccttgccagcccccctggacttacgccaagcggccatgatcggtacagcaggatacacggcgatgttgtgcgttctggcgcttgaacgtcacggagtggtgccgggtaatggggaaatcgtggtgtccggtgcagcaggcggcgtcggctccgttgcgacgacccttcttgccgctaagggctatgaggtagcggcagtgactggacgtgcgtccgaagcagaatatctgcgcggtttgggggcggcgagcgtaattgatcgtaacgaattaacggggaaggtacgcccgctgggtcaggagcgttgggctggcgggattgacgtggcgggatcaaccgtgcttgcgaacatgctttctatgatgaagtatcgcggggtagtcgctgcgtgtggcctggccgcgggcatggatctgcccgcgtctgtcgcgccctttattcttcgtgggatgacgctggcaggggtggatagcgttatgtgcccaaagacagatcgtttagcagcgtgggcccgtttggcgtcagatcttgaccctgccaagctggaggagatgactacagagttgccgtttagtgaagtaatcgagacagcacccaaattcttggacgggacggttcgtggccgcattgttatccccgtaacgccctaagaactctagaaataattttgtttaactttaagaaggagatatacatatgcgcaaagtgccgattatcacggctgacgaggccgcaaaactgatcaaggacggcgacaccgtgacaactagcggctttgtgggtaacgcgatccctgaggcccttgaccgtgcagtcgaaaagcgtttcctggaaacgggcgaaccgaagaacattacttatgtatattgcggcagtcagggcaatcgcgacggtcgtggcgcagaacatttcgcgcatgaaggcctgctgaaacgttatatcgctggccattgggcgaccgtcccggcgttagggaaaatggccatggagaataaaatggaggcctacaatgtctctcagggcgccttgtgtcatctctttcgcgatattgcgagccataaaccgggtgtgttcacgaaagtaggaatcggcaccttcattgatccacgtaacggtggtgggaaggtcaacgatattaccaaggaagatatcgtagaactggtggaaattaaagggcaggaatacctgttttatccggcgttcccgatccatgtcgcgctgattcgtggcacctatgcggacgagagtggtaacatcacctttgaaaaagaggtagcgcctttggaagggacttctgtctgtcaagcggtgaagaactcgggtggcattgtcgtggttcaggttgagcgtgtcgtcaaagcaggcacgctggatccgcgccatgtgaaagttccgggtatctatgtagattacgtagtcgtcgcggatccggaggaccatcaacagtcccttgactgcgaatatgatcctgcccttagtggagagcaccgtcgtccggaggtggtgggtgaaccactgcctttatccgcgaagaaagtcatcggccgccgtggcgcgattgagctcgagaaagacgttgcagtgaaccttggggtaggtgcacctgagtatgtggcctccgtggccgatgaagaaggcattgtggattttatgactctcacagcggagtccggcgctatcggtggcgttccagccggcggtgttcgctttggggcgagctacaatgctgacgccttgatcgaccagggctaccaatttgattattacgacggtgggggtctggatctttgttacctgggtttagctgaatgcgacgaaaagggtaatatcaatgttagccgcttcggtcctcgtatcgctgggtgcggcggattcattaacattacccaaaacacgccgaaagtcttcttttgtgggacctttacagccggggggctgaaagtgaaaattgaagatggtaaggtgattatcgttcaggaagggaaacagaagaaattccttaaggcagtggagcaaatcacctttaatggagacgtggccttagcgaacaagcaacaagttacctacatcacggagcgttgcgtcttcctcctcaaagaagacggtttacacctttcggaaatcgcgccaggcatcgatctgcagacccagattttggatgttatggactttgccccgatcattgatcgtgacgcaaacgggcagattaaactgatggacgcggcgttattcgcagaagggctgatgggcttgaaagaaatgaagtcttgataagaaggagatatacatatgagcttaacccaaggcatgaaagctaaacaactgttagcatactttcagggtaaagccgatcaggatgcacgtgaagcgaaagcccgcggtgagctggtctgctggtcggcgtcagtcgcgccgccggaattttgcgtaacaatgggcattgccatgatctacccggagactcatgcagcgggcatcggtgcccgcaaaggtgcgatggacatgctggaagttgcggaccgcaaaggctacaacgtggattgttgttcctacggccgtgtaaatatgggttacatggaatgtttaaaagaagccgccatcacgggcgtcaagccggaagttttggttaattcccctgctgctgacgttccgcttcccgatttggtgattacgtgtaataatatctgtaacacgctgctgaaatggtacgaaaacttagcagcagaactcgatattccttgcatcgtgatcgacgtaccgtttaatcataccatgccgattccggaatatgccaaggcctacatcgcggaccagttccgcaatgcaatttctcagctggaagttatttgtggccgtccgttcgattggaagaaatttaaggaggtcaaagatcagacccagcgtagcgtataccactggaaccgcattgccgagatggcgaaatacaagcctagcccgctgaacggcttcgatctgttcaattacatggcgttaatcgtggcgtgccgcagcctggattatgcagaaattacctttaaagcgttcgcggacgaattagaagagaatttgaaggcgggtatctacgcctttaaaggtgcggaaaaaacgcgctttcaatgggaaggtatcgcggtgtggccacatttaggtcacacgtttaaatctatgaagaatctgaattcgattatgaccggtacggcataccccgccctttgggacctgcactatgacgctaacgacgaatctatgcactctatggctgaagcgtacacccgtatttatattaatacttgtctgcagaacaaagtagaggtcctgcttgggatcatggaaaaaggccaggtggatggtaccgtatatcatctgaatcgcagctgcaaactgatgagtttcctgaacgtggaaacggctgaaattattaaagagaagaacggtcttccttacgtctccattgatggcgatcagaccgatcctcgcgttttttctccggcccagtttgatacccgtgttcaggccctggttgagatgatggaggccaatatggcggcagcggaataataagaaggagatatacatatgtcacgcgtggaggcaatcctgtcgcagctgaaagatgtcgccgcgaatccgaaaaaagccatggatgactataaagctgaaacaggtaagggcgcggttggtatcatgccgatctacagccccgaagaaatggtacacgccgctggctatttgccgatgggaatctggggcgcccagggcaaaacgattagtaaagcgcgcacctatctgcctgcttttgcctgcagcgtaatgcagcaggttatggaattacagtgcgagggcgcgtatgatgacctgtccgcagttatttttagcgtaccgtgcgacactctcaaatgtcttagccagaaatggaaaggtacgtccccagtgattgtatttacgcatccgcagaaccgcggattagaagcggcgaaccaattcttggttaccgagtatgaactggtaaaagcacaactggaatcagttctgggtgtgaaaatttcaaacgccgccctggaaaattcgattgcaatttataacgagaatcgtgccgtgatgcgtgagttcgtgaaagtggcagcggactatcctcaagtcattgacgcagtgagccgccacgcggtttttaaagcgcgccagtttatgcttaaggaaaaacataccgcacttgtgaaagaactgatcgctgagattaaagcaacgccagtccagccgtgggacggaaaaaaggttgtagtgacgggcattctgttggaaccgaatgagttattagatatctttaatgagtttaagatcgcgattgttgatgatgatttagcgcaggaaagccgtcggatccgtgttgacgttctggacggagaaggcggaccgctctaccgtatggctaaagcgtggcagcaaatgtatggctgctcgctggcaaccgacaccaagaagggtcgcggccgtatgttaattaacaaaacgattcagaccggtgcggacgctatcgtagttgcaatgatgaagttttgcgacccagaagaatgggattatccggtaatgtaccgtgaatttgaagaaaaaggggtcaaatcacttatgattgaggtggatcaggaagtatcgtctttcgaacagattaaaacccgtctgcagtcattcgtcgaaatgctttaataagaaggagatatacatatgtataccttggggattgatgtcggttctgcctctagtaaagcggtgattctgaaagatggaaaagatattgtcgctgccgaggttgtccaagtcggtaccggctcctcgggtccccaacgcgcactggacaaagcctttgaagtctctggcttaaaaaaggaagacatcagctacacagtagctacgggctatgggcgcttcaattttagcgacgcggataaacagatttcggaaattagctgtcatgccaaaggcatttatttcttagtaccaactgcgcgcactattattgacattggcggccaagatgcgaaagccatccgcctggacgacaaggggggtattaagcaattcttcatgaatgataaatgcgcggcgggcacggggcgtttcctggaagtcatggctcgcgtacttgaaaccaccctggatgaaatggctgaactggatgaacaggcgactgacaccgctcccatttcaagcacctgcacggttttcgccgaaagcgaagtaattagccaattgagcaatggtgtctcacgcaacaacatcattaaaggtgtccatctgagcgttgcgtcacgtgcgtgtggtctggcgtatcgcggcggtttggagaaagatgttgttatgacaggtggcgtggcaaaaaatgcaggggtggtgcgcgcggtggcgggcgttctgaagaccgatgttatcgttgctccgaatcctcagacgaccggtgcactgggggcagcgctgtatgcttatgaggccgcccagaagaagtagatggtagtgtggggtctccccatgcgagagtagggaactgccaggcatcaaataaaacgaaaggctcagtcgaaagactgggcctttcgttttatctgttgtttgtcggtgaacgctctcctgagtaggacaaatccgccgggagcggatttgaacgttgcgaagcaacggcccggagggtggcgggcaggacgcccgccataaactgccaggcatcaaattaagcagaaggccatcctgacggatggcctttt

SEQ ID NO: 242 - DNA, 5829 bp, Artificial Sequence
  Synthetic
atgcgtgcggtactgatcgagaagtccgatgatacacagtccgtctctgtcaccgaactggctgaagatcaactgccggaaggcgacgttttggtagatgttgcttattcaacactgaactacaaagacgccctggcaattaccggtaaagcccccgtcgttcgtcgttttccgatggtacctggaatcgactttacgggtaccgtggcccagtcttcccacgccgacttcaagccaggtgatcgcgtaatcctgaatggttggggtgtgggggaaaaacattggggcggtttagcggagcgcgctcgcgtgcgcggagactggcttgttcccttgccagcccccctggacttacgccaagcggccatgatcggtacagcaggatacacggcgatgttgtgcgttctggcgcttgaacgtcacggagtggtgccgggtaatggggaaatcgtggtgtccggtgcagcaggcggcgtcggctccgttgcgacgacccttcttgccgctaagggctatgaggtagcggcagtgactggacgtgcgtccgaagcagaatatctgcgcggtttgggggcggcgagcgtaattgatcgtaacgaattaacggggaaggtacgcccgctgggtcaggagcgttgggctggcgggattgacgtggcgggatcaaccgtgcttgcgaacatgctttctatgatgaagtatcgcggggtagtcgctgcgtgtggcctggccgcgggcatggatctgcccgcgtctgtcgcgccctttattcttcgtgggatgacgctggcaggggtggatagcgttatgtgcccaaagacagatcgtttagcagcgtgggcccgtttggcgtcagatcttgaccctgccaagctggaggagatgactacagagttgccgtttagtgaagtaatcgagacagcacccaaattcttggacgggacggttcgtggccgcattgttatccccgtaacgccctaagaactctagaaataattttgtttaactttaagaaggagatatacatatgcgcaaagtgccgattatcacggctgacgaggccgcaaaactgatcaaggacggcgacaccgtgacaactagcggctttgtgggtaacgcgatccctgaggcccttgaccgtgcagtcgaaaagcgtttcctggaaacgggcgaaccgaagaacattacttatgtatattgcggcagtcagggcaatcgcgacggtcgtggcgcagaacatttcgcgcatgaaggcctgctgaaacgttatatcgctggccattgggcgaccgtcccggcgttagggaaaatggccatggagaataaaatggaggcctacaatgtctctcagggcgccttgtgtcatctctttcgcgatattgcgagccataaaccgggtgtgttcacgaaagtaggaatcggcaccttcattgatccacgtaacggtggtgggaaggtcaacgatattaccaaggaagatatcgtagaactggtggaaattaaagggcaggaatacctgttttatccggcgttcccgatccatgtcgcgctgattcgtggcacctatgcggacgagagtggtaacatcacctttgaaaaagaggtagcgcctttggaagggacttctgtctgtcaagcggtgaagaactcgggtggcattgtcgtggttcaggttgagcgtgtcgtcaaagcaggcacgctggatccgcgccatgtgaaagttccgggtatctatgtagattacgtagtcgtcgcggatccggaggaccatcaacagtcccttgactgcgaatatgatcctgcccttagtggagagcaccgtcgtccggaggtggtgggtgaaccactgcctttatccgcgaagaaagtcatcggccgccgtggcgcgattgagctcgagaaagacgttgcagtgaaccttggggtaggtgcacctgagtatgtggcctccgtggccgatgaagaaggcattgtggattttatgactctcacagcggagtccggcgctatcggtggcgttccagccggcggtgttcgctttggggcgagctacaatgctgacgccttgatcgaccagggctaccaatttgattattacgacggtgggggtctggatctttgttacctgggtttagctgaatgcgacgaaaagggtaatatcaatgttagccgcttcggtcctcgtatcgctgggtgcggcggattcattaacattacccaaaacacgccgaaagtcttcttttgtgggacctttacagccggggggctgaaagtgaaaattgaagatggtaaggtgattatcgttcaggaagggaaacagaagaaattccttaaggcagtggagcaaatcacctttaatggagacgtggccttagcgaacaagcaacaagttacctacatcacggagcgttgcgtcttcctcctcaaagaagacggtttacacctttcggaaatcgcgccaggcatcgatctgcagacccagattttggatgttatggactttgccccgatcattgatcgtgacgcaaacgggcagattaaactgatggacgcggcgttattcgcagaagggctgatgggcttgaaagaaatgaagtcttgataagaaggagatatacatatgagcttaacccaaggcatgaaagctaaacaactgttagcatactttcagggtaaagccgatcaggatgcacgtgaagcgaaagcccgcggtgagctggtctgctggtcggcgtcagtcgcgccgccggaattttgcgtaacaatgggcattgccatgatctacccggagactcatgcagcgggcatcggtgcccgcaaaggtgcgatggacatgctggaagttgcggaccgcaaaggctacaacgtggattgttgttcctacggccgtgtaaatatgggttacatggaatgtttaaaagaagccgccatcacgggcgtcaagccggaagttttggttaattcccctgctgctgacgttccgcttcccgatttggtgattacgtgtaataatatctgtaacacgctgctgaaatggtacgaaaacttagcagcagaactcgatattccttgcatcgtgatcgacgtaccgtttaatcataccatgccgattccggaatatgccaaggcctacatcgcggaccagttccgcaatgcaatttctcagctggaagttatttgtggccgtccgttcgattggaagaaatttaaggaggtcaaagatcagacccagcgtagcgtataccactggaaccgcattgccgagatggcgaaatacaagcctagcccgctgaacggcttcgatctgttcaattacatggcgttaatcgtggcgtgccgcagcctggattatgcagaaattacctttaaagcgttcgcggacgaattagaagagaatttgaaggcgggtatctacgcctttaaaggtgcggaaaaaacgcgctttcaatgggaaggtatcgcggtgtggccacatttaggtcacacgtttaaatctatgaagaatctgaattcgattatgaccggtacggcataccccgccctttgggacctgcactatgacgctaacgacgaatctatgcactctatggctgaagcgtacacccgtatttatattaatacttgtctgcagaacaaagtagaggtcctgcttgggatcatggaaaaaggccaggtggatggtaccgtatatcatctgaatcgcagctgcaaactgatgagtttcctgaacgtggaaacggctgaaattattaaagagaagaacggtcttccttacgtctccattgatggcgatcagaccgatcctcgcgttttttctccggcccagtttgatacccgtgttcaggccctggttgagatgatggaggccaatatggcggcagcggaataataagaaggagatatacatatgtcacgcgtggaggcaatcctgtcgcagctgaaagatgtcgccgcgaatccgaaaaaagccatggatgactataaagctgaaacaggtaagggcgcggttggtatcatgccgatctacagccccgaagaaatggtacacgccgctggctatttgccgatgggaatctggggcgcccagggcaaaacgattagtaaagcgcgcacctatctgcctgcttttgcctgcagcgtaatgcagcaggttatggaattacagtgcgagggcgcgtatgatgacctgtccgcagttatttttagcgtaccgtgcgacactctcaaatgtcttagccagaaatggaaaggtacgtccccagtgattgtatttacgcatccgcagaaccgcggattagaagcggcgaaccaattcttggttaccgagtatgaactggtaaaagcacaactggaatcagttctgggtgtgaaaatttcaaacgccgccctggaaaattcgattgcaatttataacgagaatcgtgccgtgatgcgtgagttcgtgaaagtggcagcggactatcctcaagtcattgacgcagtgagccgccacgcggtttttaaagcgcgccagtttatgcttaaggaaaaacataccgcacttgtgaaagaactgatcgctgagattaaagcaacgccagtccagccgtgggacggaaaaaaggttgtagtgacgggcattctgttggaaccgaatgagttattagatatctttaatgagtttaagatcgcgattgttgatgatgatttagcgcaggaaagccgtcggatccgtgttgacgttctggacggagaaggcggaccgctctaccgtatggctaaagcgtggcagcaaatgtatggctgctcgctggcaaccgacaccaagaagggtcgcggccgtatgttaattaacaaaacgattcagaccggtgcggacgctatcgtagttgcaatgatgaagttttgcgacccagaagaatgggattatccggtaatgtaccgtgaatttgaagaaaaaggggtcaaatcacttatgattgaggtggatcaggaagtatcgtctttcgaacagattaaaacccgtctgcagtcattcgtcgaaatgctttaataagaaggagatatacatatgtataccttggggattgatgtcggttctgcctctagtaaagcggtgattctgaaagatggaaaagatattgtcgctgccgaggttgtccaagtcggtaccggctcctcgggtccccaacgcgcactggacaaagcctttgaagtctctggcttaaaaaaggaagacatcagctacacagtagctacgggctatgggcgcttcaattttagcgacgcggataaacagatttcggaaattagctgtcatgccaaaggcatttatttcttagtaccaactgcgcgcactattattgacattggcggccaagatgcgaaagccatccgcctggacgacaaggggggtattaagcaattcttcatgaatgataaatgcgcggcgggcacggggcgtttcctggaagtcatggctcgcgtacttgaaaccaccctggatgaaatggctgaactggatgaacaggcgactgacaccgctcccatttcaagcacctgcacggttttcgccgaaagcgaagtaattagccaattgagcaatggtgtctcacgcaacaacatcattaaaggtgtccatctgagcgttgcgtcacgtgcgtgtggtctggcgtatcgcggcggtttggagaaagatgttgttatgacaggtggcgtggcaaaaaatgcaggggtggtgcgcgcggtggcgggcgttctgaagaccgatgttatcgttgctccgaatcctcagacgaccggtgcactgggggcagcgctgtatgcttatgaggccgcccagaagaagta

SEQ ID NO: 243 - DNA, 184 bp, Artificial Sequence
  Synthetic
ttaaccacgacctttaaccagccaagcaataaactctttcgcagcctggccctccaaatagctagaaacatcagaagtgaaagttccctccgcgtggcgttcgaactcgtccatattacctcctgactgtgtctacttcgttgattacgttttgggtttccacccgtcggctcaatcgccgtca

SEQ ID NO: 244 - DNA, 114 bp, Artificial Sequence
  Synthetic
ttaaccacgacctttaaccagccaagcaataaactctttcgcagcctggccctccaaatagctagaaacatcagaagtgaaagttccctccgcgtggcgttcgaactcgtccat

SEQ ID NO: 245 - DNA, 70 bp, Artificial Sequence
  Synthetic
attacctcctgactgtgtctacttcgttgattacgttttgggtttccacccgtcggctcaatcgccgtca

SEQ ID NO: 246 - DNA, 25 bp, Artificial Sequence
  Synthetic
attacctcctgactgtgtctacttc

SEQ ID NO: 247 - DNA, 40 bp, Artificial Sequence
  Synthetic
gggcagaaaaaaccccgccgttggcggggaagcacgttgc

SEQ ID NO: 248 - DNA, 1589 bp, Artificial Sequence
  Synthetic
gggcagaaaaaaccccgccgttggcggggaagcacgttgctggcaaattaccattcatgttgccggatgcggcgtaaacgccttatccggcctacaaaaatgtgcaaattcaataaattgcaattccccttgtaggcctgataagcgcagcgcatcaggcaatttggcgttgccgtcagtctcagttaatcaggttacggcgattaaccacgacctttaaccagccaagcaataaactctttcgcagcctggccctccaaatagctagaaacatcagaagtgaaagttccctccgcgtggcgttcgaactcgtccatattacctcctgactgtgtctacttcgttgattacgttttgggtttccacccgtcggctcaatcgccgtcaaccctgttatcgtctgtcgtaaaacaacctttagaatttttttcacaaacagccattttttgttagtcgacgaaatactcttttctctgccccttattcccgctattaaaaaaaacaattaaacgtaaactttgcgcaattcaggccgataaccccggtattcgttttacgtgtcgaaagataaacgaagttcctatactttctagagaataggaacttcggaataggaacttcatttctcgttcgctgccacctaagaatactctacggtcacatacaaatggcgcgccttacgccccgccctgccactcatcgcagtactgttgtattcattaagcatctgccgacatggaagccatcacaaacggcatgatgaacctgaatcgccagcggcatcagcaccttgtcgccttgcgtataatatttgcccatggtgaaaacgggggcgaagaagttgtccatattggccacgtttaaatcaaaactggtgaaactcacccagggattggctgagacgaaaaacatattctcaataaaccctttagggaaataggccaggttttcaccgtaacacgccacatcttgcgaatatatgtgtagaaactgccggaaatcgtcgtggtattcactccagagcgatgaaaacgtttcagtttgctcatggaaaacggtgtaacaagggtgaacactatcccatatcaccagctcaccgtctttcattgccatacgtaattccggatgagcattcatcaggcgggcaagaatgtgaataaaggccggataaaacttgtgcttatttttctttacggtctttaaaaaggccgtaatatccagctgaacggtctggttataggtacattgagcaactgactgaaatgcctcaaaatgttctttacgatgccattgggatatatcaacggtggtatatccagtgatttttttctccattttagcttccttagctcctgaaaatctcgacaactcaaaaaatacgcccggtagtgatcttatttcattatggtgaaagttggaacctcttacgtgccgatcaacgtctcattttcgccaaaagttggcccagggcttcccggtatcaacagggacaccaggatttatttattctgcgaagtgatcttccgtcacaggtaggcgcgccgaagttcctatactttctagagaataggaacttcggaataggaact

SEQ ID NO: 249 - DNA, 1420 bp, Artificial Sequence
  Synthetic
ttattatcgcaccgcaatcgggattttcgattcataaagcaggtcgtaggtcggcttgttgagcaggtcttgcagcgtgaaaccgtccagatacgtgaaaaacgacttcattgcaccgccgagtatgcccgtcagccggcaggacggcgtaatcaggcattcgttgttcgggcccatacactcgaccagctgcatcggttcgaggtggcggacgaccgcgccgatattgatgcgttcgggcggcgcggccagcctcagcccgccgcctttcccgcgtacgctgtgcaagaacccgcctttgaccagcgcggtaaccactttcatcaaatggcttttggaaatgccgtaggtcgaggcgatggtggcgatattgaccagcgcgtcgtcgttgacggcggtgtagatgaggacgcgcagcccgtagtcggtatgttgggtcagatacatacaacctccttagtacatgcaaaattatttctagagcaacatacgagccggaagcataaagtgtaaagcctggggtgcctaatgagttgagttgaggaattataacaggaagaaatattcctcatacgcttgtaattcctctatggttgttgacaattaatcatcggctcgtataatgtataacattcatattttgtgaattttaaactctagaaataattttgtttaactttaagaaggagatatacatatggctagcaaaggcgaagaattgttcacgggcgttgttcctattttggttgaattggatggcgatgttaatggccataaattcagcgttagcggcgaaggcgaaggcgatgctacgtatggcaaattgacgttgaaattcatttgtacgacgggcaaattgcctgttccttggcctacgttggttacgacgttcagctatggcgttcaatgtttcagccgttatcctgatcatatgaaacgtcatgatttcttcaaaagcgctatgcctgaaggctatgttcaagaacgtacgattagcttcaaagatgatggcaattataaaacgcgtgctgaagttaaattcgaaggcgatacgttggttaatcgtattgaattgaaaggcattgatttcaaagaagatggcaatattttgggccataaattggaatataattataatagccataatgtttatattacggctgataaacaaaaaaatggcattaaagctaatttcaaaattcgtcataatattgaagatggcagcgttcaattggctgatcattatcaacaaaatacgcctattggcgatggccctgttttgttgcctgataatcattatttgagcacgcaaagcgctttgagcaaagatcctaatgaaaaacgtgatcatatggttttgttggaattcgttacggctgctggcattacgcatggcatggatgaattgtataaataataa

SEQ ID NO: 250 - DNA, 3383 bp, Artificial Sequence
  Synthetic
ggtaccgtcagcataacaccctgacctctcattaattgttcatgccgggcggcactatcgtcgtccggccttttcctctcttactctgctacgtacatctatttctataaatccgttcaatttgtctgttttttgcacaaacatgaaatatcagacaattccgtgacttaagaaaatttatacaaatcagcaatataccccttaaggagtatataaaggtgaatttgatttacatcaataagcggggttgctgaatcgttaaggtaggcggtaatagaaaagaaatcgaggcaaaaatgagcaaagtcagactcgcaattatggatcctctggccgtcgtattacaacgtcgtgactgggaaaaccctggcgttacccaacttaatcgccttgcggcacatccccctttcgccagctggcgtaatagcgaagaggcccgcaccgatcgcccttcccaacagttgcgcagcctgaatggcgaatggcgctttgcctggtttccggcaccagaagcggtgccggaaagctggctggagtgcgatcttcctgacgccgatactgtcgtcgtcccctcaaactggcagatgcacggttacgatgcgcctatctacaccaacgtgacctatcccattacggtcaatccgccgtttgttcccgcggagaatccgacaggttgttactcgctcacatttaatattgatgaaagctggctacaggaaggccagacgcgaattatttttgatggcgttaactcggcgtttcatctgtggtgcaacgggcgctgggtcggttacggccaggacagccgtttgccgtctgaatttgacctgagcgcatttttacgcgccggagaaaaccgcctcgcggtgatggtgctgcgctggagtgacggcagttatctggaagatcaggatatgtggcggatgagcggcattttccgtgacgtctcgttgctgcataaaccgaccacgcaaatcagcgatttccaagttaccactctctttaatgatgatttcagccgcgcggtactggaggcagaagttcagatgtacggcgagctgcgcgatgaactgcgggtgacggtttctttgtggcagggtgaaacgcaggtcgccagcggcaccgcgcctttcggcggtgaaattatcgatgagcgtggcggttatgccgatcgcgtcacactacgcctgaacgttgaaaatccggaactgtggagcgccgaaatcccgaatctctatcgtgcagtggttgaactgcacaccgccgacggcacgctgattgaagcagaagcctgcgacgtcggtttccgcgaggtgcggattgaaaatggtctgctgctgctgaacggcaagccgttgctgattcgcggcgttaaccgtcacgagcatcatcctctgcatggtcaggtcatggatgagcagacgatggtgcaggatatcctgctgatgaagcagaacaactttaacgccgtgcgctgttcgcattatccgaaccatccgctgtggtacacgctgtgcgaccgctacggcctgtatgtggtggatgaagccaatattgaaacccacggcatggtgccaatgaatcgtctgaccgatgatccgcgctggctacccgcgatgagcgaacgcgtaacgcggatggtgcagcgcgatcgtaatcacccgagtgtgatcatctggtcgctggggaatgaatcaggccacggcgctaatcacgacgcgctgtatcgctggatcaaatctgtcgatccttcccgcccggtacagtatgaaggcggcggagccgacaccacggccaccgatattatttgcccgatgtacgcgcgcgtggatgaagaccagcccttcccggcggtgccgaaatggtccatcaaaaaatggctttcgctgcctggagaaatgcgcccgctgatcctttgcgaatatgcccacgcgatgggtaacagtcttggcggcttcgctaaatactggcaggcgtttcgtcagtacccccgtttacagggcggcttcgtctgggactgggtggatcagtcgctgattaaatatgatgaaaacggcaacccgtggtcggcttacggcggtgattttggcgatacgccgaacgatcgccagttctgtatgaacggtctggtctttgccgaccgcacgccgcatccggcgctgacggaagcaaaacaccaacagcagtatttccagttccgtttatccgggcgaaccatcgaagtgaccagcgaatacctgttccgtcatagcgataacgagttcctgcactggatggtggcactggatggcaagccgctggcaagcggtgaagtgcctctggatgttggcccgcaaggtaagcagttgattgaactgcctgaactgccgcagccggagagcgccggacaactctggctaacggtacgcgtagtgcaaccaaacgcgaccgcatggtcagaagccggacacatcagcgcctggcagcaatggcgtctggcggaaaacctcagcgtgacactcccctccgcgtcccacgccatccctcaactgaccaccagcggaacggatttttgcatcgagctgggtaataagcgttggcaatttaaccgccagtcaggctttctttcacagatgtggattggcgatgaaaaacaactgctgaccccgctgcgcgatcagttcacccgtgcgccgctggataacgacattggcgtaagtgaagcgacccgcattgaccctaacgcctgggtcgaacgctggaaggcggcgggccattaccaggccgaagcggcgttgttgcagtgcacggcagatacacttgccgacgcggtgctgattacaaccgcccacgcgtggcagcatcaggggaaaaccttatttatcagccggaaaacctaccggattgatgggcacggtgagatggtcatcaatgtggatgttgcggtggcaagcgatacaccgcatccggcgcggattggcctgacctgccagctggcgcaggtctcagagcgggtaaactggctcggcctggggccgcaagaaaactatcccgaccgccttactgcagcctgttttgaccgctgggatctgccattgtcagacatgtataccccgtacgtcttcccgagcgaaaacggtctgcgctgcgggacgcgcgaattgaattatggcccacaccagtggcgcggcgacttccagttcaacatcagccgctacagccaacaacaactgatggaaaccagccatcgccatctgctgcacgcggaagaaggcacatggctgaatatcgacggtttccatatggggattggtggcgacgactcctggagcccgtcagtatcggcggaattccagctgagcgccggtcgctaccattaccagttggtctggtgtcaaaaataa

SEQ ID NO: 251 - DNA, 3258 bp, Artificial Sequence
  Synthetic
ggtacccatttcctctcatcccatccggggtgagagtcttttcccccgacttatggctcatgcatgcatcaaaaaagatgtgagcttgatcaaaaacaaaaaatatttcactcgacaggagtatttatattgcgcccgttacgtgggcttcgactgtaaatcagaaaggagaaaacacctatgacgacctacgatcgggatcctctggccgtcgtattacaacgtcgtgactgggaaaaccctggcgttacccaacttaatcgccttgcggcacatccccctttcgccagctggcgtaatagcgaagaggcccgcaccgatcgcccttcccaacagttgcgcagcctgaatggcgaatggcgctttgcctggtttccggcaccagaagcggtgccggaaagctggctggagtgcgatcttcctgacgccgatactgtcgtcgtcccctcaaactggcagatgcacggttacgatgcgcctatctacaccaacgtgacctatcccattacggtcaatccgccgtttgttcccgcggagaatccgacaggttgttactcgctcacatttaatattgatgaaagctggctacaggaaggccagacgcgaattatttttgatggcgttaactcggcgtttcatctgtggtgcaacgggcgctgggtcggttacggccaggacagccgtttgccgtctgaatttgacctgagcgcatttttacgcgccggagaaaaccgcctcgcggtgatggtgctgcgctggagtgacggcagttatctggaagatcaggatatgtggcggatgagcggcattttccgtgacgtctcgttgctgcataaaccgaccacgcaaatcagcgatttccaagttaccactctctttaatgatgatttcagccgcgcggtactggaggcagaagttcagatgtacggcgagctgcgcgatgaactgcgggtgacggtttctttgtggcagggtgaaacgcaggtcgccagcggcaccgcgcctttcggcggtgaaattatcgatgagcgtggcggttatgccgatcgcgtcacactacgcctgaacgttgaaaatccggaactgtggagcgccgaaatcccgaatctctatcgtgcagtggttgaactgcacaccgccgacggcacgctgattgaagcagaagcctgcgacgtcggtttccgcgaggtgcggattgaaaatggtctgctgctgctgaacggcaagccgttgctgattcgcggcgttaaccgtcacgagcatcatcctctgcatggtcaggtcatggatgagcagacgatggtgcaggatatcctgctgatgaagcagaacaactttaacgccgtgcgctgttcgcattatccgaaccatccgctgtggtacacgctgtgcgaccgctacggcctgtatgtggtggatgaagccaatattgaaacccacggcatggtgccaatgaatcgtctgaccgatgatccgcgctggctacccgcgatgagcgaacgcgtaacgcggatggtgcagcgcgatcgtaatcacccgagtgtgatcatctggtcgctggggaatgaatcaggccacggcgctaatcacgacgcgctgtatcgctggatcaaatctgtcgatccttcccgcccggtacagtatgaaggcggcggagccgacaccacggccaccgatattatttgcccgatgtacgcgcgcgtggatgaagaccagcccttcccggcggtgccgaaatggtccatcaaaaaatggctttcgctgcctggagaaatgcgcccgctgatcctttgcgaatatgcccacgcgatgggtaacagtcttggcggcttcgctaaatactggcaggcgtttcgtcagtacccccgtttacagggcggcttcgtctgggactgggtggatcagtcgctgattaaatatgatgaaaacggcaacccgtggtcggcttacggcggtgattttggcgatacgccgaacgatcgccagttctgtatgaacggtctggtctttgccgaccgcacgccgcatccggcgctgacggaagcaaaacaccaacagcagtatttccagttccgtttatccgggcgaaccatcgaagtgaccagcgaatacctgttccgtcatagcgataacgagttcctgcactggatggtggcactggatggcaagccgctggcaagcggtgaagtgcctctggatgttggcccgcaaggtaagcagttgattgaactgcctgaactgccgcagccggagagcgccggacaactctggctaacggtacgcgtagtgcaaccaaacgcgaccgcatggtcagaagccggacacatcagcgcctggcagcaatggcgtctggcggaaaacctcagcgtgacactcccctccgcgtcccacgccatccctcaactgaccaccagcggaacggatttttgcatcgagctgggtaataagcgttggcaatttaaccgccagtcaggctttctttcacagatgtggattggcgatgaaaaacaactgctgaccccgctgcgcgatcagttcacccgtgcgccgctggataacgacattggcgtaagtgaagcgacccgcattgaccctaacgcctgggtcgaacgctggaaggcggcgggccattaccaggccgaagcggcgttgttgcagtgcacggcagatacacttgccgacgcggtgctgattacaaccgcccacgcgtggcagcatcaggggaaaaccttatttatcagccggaaaacctaccggattgatgggcacggtgagatggtcatcaatgtggatgttgcggtggcaagcgatacaccgcatccggcgcggattggcctgacctgccagctggcgcaggtctcagagcgggtaaactggctcggcctggggccgcaagaaaactatcccgaccgccttactgcagcctgttttgaccgctgggatctgccattgtcagacatgtataccccgtacgtcttcccgagcgaaaacggtctgcgctgcgggacgcgcgaattgaattatggcccacaccagtggcgcggcgacttccagttcaacatcagccgctacagccaacaacaactgatggaaaccagccatcgccatctgctgcacgcggaagaaggcacatggctgaatatcgacggtttccatatggggattggtggcgacgactcctggagcccgtcagtatcggcggaattccagctgagcgccggtcgctaccattaccagttggtctggtgtcaaaaataa

SEQ ID NO: 252 - DNA, 3386 bp, Artificial Sequence
  Synthetic
ggtaccgtcagcataacaccctgacctctcattaattgttcatgccgggcggcactatcgtcgtccggccttttcctctcttactctgctacgtacatctatttctataaatccgttcaatttgtctgttttttgcacaaacatgaaatatcagacaattccgtgacttaagaaaatttatacaaatcagcaatataccccttaaggagtatataaaggtgaatttgatttacatcaataagcggggttgctgaatcgttaaggatccctctagaaataattttgtttaactttaagaaggagatatacatatgactatgattacggattctctggccgtcgtattacaacgtcgtgactgggaaaaccctggcgttacccaacttaatcgccttgcggcacatccccctttcgccagctggcgtaatagcgaagaggcccgcaccgatcgcccttcccaacagttgcgcagcctgaatggcgaatggcgctttgcctggtttccggcaccagaagcggtgccggaaagctggctggagtgcgatcttcctgacgccgatactgtcgtcgtcccctcaaactggcagatgcacggttacgatgcgcctatctacaccaacgtgacctatcccattacggtcaatccgccgtttgttcccgcggagaatccgacaggttgttactcgctcacatttaatattgatgaaagctggctacaggaaggccagacgcgaattatttttgatggcgttaactcggcgtttcatctgtggtgcaacgggcgctgggtcggttacggccaggacagccgtttgccgtctgaatttgacctgagcgcatttttacgcgccggagaaaaccgcctcgcggtgatggtgctgcgctggagtgacggcagttatctggaagatcaggatatgtggcggatgagcggcattttccgtgacgtctcgttgctgcataaaccgaccacgcaaatcagcgatttccaagttaccactctctttaatgatgatttcagccgcgcggtactggaggcagaagttcagatgtacggcgagctgcgcgatgaactgcgggtgacggtttctttgtggcagggtgaaacgcaggtcgccagcggcaccgcgcctttcggcggtgaaattatcgatgagcgtggcggttatgccgatcgcgtcacactacgcctgaacgttgaaaatccggaactgtggagcgccgaaatcccgaatctctatcgtgcagtggttgaactgcacaccgccgacggcacgctgattgaagcagaagcctgcgacgtcggtttccgcgaggtgcggattgaaaatggtctgctgctgctgaacggcaagccgttgctgattcgcggcgttaaccgtcacgagcatcatcctctgcatggtcaggtcatggatgagcagacgatggtgcaggatatcctgctgatgaagcagaacaactttaacgccgtgcgctgttcgcattatccgaaccatccgctgtggtacacgctgtgcgaccgctacggcctgtatgtggtggatgaagccaatattgaaacccacggcatggtgccaatgaatcgtctgaccgatgatccgcgctggctacccgcgatgagcgaacgcgtaacgcggatggtgcagcgcgatcgtaatcacccgagtgtgatcatctggtcgctggggaatgaatcaggccacggcgctaatcacgacgcgctgtatcgctggatcaaatctgtcgatccttcccgcccggtacagtatgaaggcggcggagccgacaccacggccaccgatattatttgcccgatgtacgcgcgcgtggatgaagaccagcccttcccggcggtgccgaaatggtccatcaaaaaatggctttcgctgcctggagaaatgcgcccgctgatcctttgcgaatatgcccacgcgatgggtaacagtcttggcggcttcgctaaatactggcaggcgtttcgtcagtacccccgtttacagggcggcttcgtctgggactgggtggatcagtcgctgattaaatatgatgaaaacggcaacccgtggtcggcttacggcggtgattttggcgatacgccgaacgatcgccagttctgtatgaacggtctggtctttgccgaccgcacgccgcatccggcgctgacggaagcaaaacaccaacagcagtatttccagttccgtttatccgggcgaaccatcgaagtgaccagcgaatacctgttccgtcatagcgataacgagttcctgcactggatggtggcactggatggcaagccgctggcaagcggtgaagtgcctctggatgttggcccgcaaggtaagcagttgattgaactgcctgaactgccgcagccggagagcgccggacaactctggctaacggtacgcgtagtgcaaccaaacgcgaccgcatggtcagaagccggacacatcagcgcctggcagcaatggcgtctggcggaaaacctcagcgtgacactcccctccgcgtcccacgccatccctcaactgaccaccagcggaacggatttttgcatcgagctgggtaataagcgttggcaatttaaccgccagtcaggctttctttcacagatgtggattggcgatgaaaaacaactgctgaccccgctgcgcgatcagttcacccgtgcgccgctggataacgacattggcgtaagtgaagcgacccgcattgaccctaacgcctgggtcgaacgctggaaggcggcgggccattaccaggccgaagcggcgttgttgcagtgcacggcagatacacttgccgacgcggtgctgattacaaccgcccacgcgtggcagcatcaggggaaaaccttatttatcagccggaaaacctaccggattgatgggcacggtgagatggtcatcaatgtggatgttgcggtggcaagcgatacaccgcatccggcgcggattggcctgacctgccagctggcgcaggtctcagagcgggtaaactggctcggcctggggccgcaagaaaactatcccgaccgccttactgcagcctgttttgaccgctgggatctgccattgtcagacatgtataccccgtacgtcttcccgagcgaaaacggtctgcgctgcgggacgcgcgaattgaattatggcccacaccagtggcgcggcgacttccagttcaacatcagccgctacagccaacaacaactgatggaaaccagccatcgccatctgctgcacgcggaagaaggcacatggctgaatatcgacggtttccatatggggattggtggcgacgactcctggagcccgtcagtatcggcggaattccagctgagcgccggtcgctaccattaccagttggtctggtgtcaaaaataa

SEQ ID NO: 253 - DNA, 3261 bp, Artificial Sequence
  Synthetic
ggtacccatttcctctcatcccatccggggtgagagtcttttcccccgacttatggctcatgcatgcatcaaaaaagatgtgagcttgatcaaaaacaaaaaatatttcactcgacaggagtatttatattgcgcccggatccctctagaaataattttgtttaactttaagaaggagatatacatatgactatgattacggattctctggccgtcgtattacaacgtcgtgactgggaaaaccctggcgttacccaacttaatcgccttgcggcacatccccctttcgccagctggcgtaatagcgaagaggcccgcaccgatcgcccttcccaacagttgcgcagcctgaatggcgaatggcgctttgcctggtttccggcaccagaagcggtgccggaaagctggctggagtgcgatcttcctgacgccgatactgtcgtcgtcccctcaaactggcagatgcacggttacgatgcgcctatctacaccaacgtgacctatcccattacggtcaatccgccgtttgttcccgcggagaatccgacaggttgttactcgctcacatttaatattgatgaaagctggctacaggaaggccagacgcgaattatttttgatggcgttaactcggcgtttcatctgtggtgcaacgggcgctgggtcggttacggccaggacagccgtttgccgtctgaatttgacctgagcgcatttttacgcgccggagaaaaccgcctcgcggtgatggtgctgcgctggagtgacggcagttatctggaagatcaggatatgtggcggatgagcggcattttccgtgacgtctcgttgctgcataaaccgaccacgcaaatcagcgatttccaagttaccactctctttaatgatgatttcagccgcgcggtactggaggcagaagttcagatgtacggcgagctgcgcgatgaactgcgggtgacggtttctttgtggcagggtgaaacgcaggtcgccagcggcaccgcgcctttcggcggtgaaattatcgatgagcgtggcggttatgccgatcgcgtcacactacgcctgaacgttgaaaatccggaactgtggagcgccgaaatcccgaatctctatcgtgcagtggttgaactgcacaccgccgacggcacgctgattgaagcagaagcctgcgacgtcggtttccgcgaggtgcggattgaaaatggtctgctgctgctgaacggcaagccgttgctgattcgcggcgttaaccgtcacgagcatcatcctctgcatggtcaggtcatggatgagcagacgatggtgcaggatatcctgctgatgaagcagaacaactttaacgccgtgcgctgttcgcattatccgaaccatccgctgtggtacacgctgtgcgaccgctacggcctgtatgtggtggatgaagccaatattgaaacccacggcatggtgccaatgaatcgtctgaccgatgatccgcgctggctacccgcgatgagcgaacgcgtaacgcggatggtgcagcgcgatcgtaatcacccgagtgtgatcatctggtcgctggggaatgaatcaggccacggcgctaatcacgacgcgctgtatcgctggatcaaatctgtcgatccttcccgcccggtacagtatgaaggcggcggagccgacaccacggccaccgatattatttgcccgatgtacgcgcgcgtggatgaagaccagcccttcccggcggtgccgaaatggtccatcaaaaaatggctttcgctgcctggagaaatgcgcccgctgatcctttgcgaatatgcccacgcgatgggtaacagtcttggcggcttcgctaaatactggcaggcgtttcgtcagtacccccgtttacagggcggcttcgtctgggactgggtggatcagtcgctgattaaatatgatgaaaacggcaacccgtggtcggcttacggcggtgattttggcgatacgccgaacgatcgccagttctgtatgaacggtctggtctttgccgaccgcacgccgcatccggcgctgacggaagcaaaacaccaacagcagtatttccagttccgtttatccgggcgaaccatcgaagtgaccagcgaatacctgttccgtcatagcgataacgagttcctgcactggatggtggcactggatggcaagccgctggcaagcggtgaagtgcctctggatgttggcccgcaaggtaagcagttgattgaactgcctgaactgccgcagccggagagcgccggacaactctggctaacggtacgcgtagtgcaaccaaacgcgaccgcatggtcagaagccggacacatcagcgcctggcagcaatggcgtctggcggaaaacctcagcgtgacactcccctccgcgtcccacgccatccctcaactgaccaccagcggaacggatttttgcatcgagctgggtaataagcgttggcaatttaaccgccagtcaggctttctttcacagatgtggattggcgatgaaaaacaactgctgaccccgctgcgcgatcagttcacccgtgcgccgctggataacgacattggcgtaagtgaagcgacccgcattgaccctaacgcctgggtcgaacgctggaaggcggcgggccattaccaggccgaagcggcgttgttgcagtgcacggcagatacacttgccgacgcggtgctgattacaaccgcccacgcgtggcagcatcaggggaaaaccttatttatcagccggaaaacctaccggattgatgggcacggtgagatggtcatcaatgtggatgttgcggtggcaagcgatacaccgcatccggcgcggattggcctgacctgccagctggcgcaggtctcagagcgggtaaactggctcggcctggggccgcaagaaaactatcccgaccgccttactgcagcctgttttgaccgctgggatctgccattgtcagacatgtataccccgtacgtcttcccgagcgaaaacggtctgcgctgcgggacgcgcgaattgaattatggcccacaccagtggcgcggcgacttccagttcaacatcagccgctacagccaacaacaactgatggaaaccagccatcgccatctgctgcacgcggaagaaggcacatggctgaatatcgacggtttccatatggggattggtggcgacgactcctggagcccgtcagtatcggcggaattccagctgagcgccggtcgctaccattaccagttggtctggtgtcaaaaataa

SEQ ID NO: 254 - DNA, 3279 bp, Artificial Sequence
  Synthetic
ggtaccagttgttcttattggtggtgttgctttatggttgcatcgtagtaaatggttgtaacaaaagcaatttttccggctgtctgtatacaaaaacgccgtaaagtttgagcgaagtcaataaactctctacccattcagggcaatatctctcttggatccctctagaaataattttgtttaactttaagaaggagatatacatatgctatgattacggattctctggccgtcgtattacaacgtcgtgactgggaaaaccctggcgttacccaacttaatcgccttgcggcacatccccctttcgccagctggcgtaatagcgaagaggcccgcaccgatcgcccttcccaacagttgcgcagcctgaatggcgaatggcgctttgcctggtttccggcaccagaagcggtgccggaaagctggctggagtgcgatcttcctgacgccgatactgtcgtcgtcccctcaaactggcagatgcacggttacgatgcgcctatctacaccaacgtgacctatcccattacggtcaatccgccgtttgttcccgcggagaatccgacaggttgttactcgctcacatttaatattgatgaaagctggctacaggaaggccagacgcgaattatttttgatggcgttaactcggcgtttcatctgtggtgcaacgggcgctgggtcggttacggccaggacagccgtttgccgtctgaatttgacctgagcgcatttttacgcgccggagaaaaccgcctcgcggtgatggtgctgcgctggagtgacggcagttatctggaagatcaggatatgtggcggatgagcggcattttccgtgacgtctcgttgctgcataaaccgaccacgcaaatcagcgatttccaagttaccactctctttaatgatgatttcagccgcgcggtactggaggcagaagttcagatgtacggcgagctgcgcgatgaactgcgggtgacggtttctttgtggcagggtgaaacgcaggtcgccagcggcaccgcgcctttcggcggtgaaattatcgatgagcgtggcggttatgccgatcgcgtcacactacgcctgaacgttgaaaatccggaactgtggagcgccgaaatcccgaatctctatcgtgcagtggttgaactgcacaccgccgacggcacgctgattgaagcagaagcctgcgacgtcggtttccgcgaggtgcggattgaaaatggtctgctgctgctgaacggcaagccgttgctgattcgcggcgttaaccgtcacgagcatcatcctctgcatggtcaggtcatggatgagcagacgatggtgcaggatatcctgctgatgaagcagaacaactttaacgccgtgcgctgttcgcattatccgaaccatccgctgtggtacacgctgtgcgaccgctacggcctgtatgtggtggatgaagccaatattgaaacccacggcatggtgccaatgaatcgtctgaccgatgatccgcgctggctacccgcgatgagcgaacgcgtaacgcggatggtgcagcgcgatcgtaatcacccgagtgtgatcatctggtcgctggggaatgaatcaggccacggcgctaatcacgacgcgctgtatcgctggatcaaatctgtcgatccttcccgcccggtacagtatgaaggcggcggagccgacaccacggccaccgatattatttgcccgatgtacgcgcgcgtggatgaagaccagcccttcccggcggtgccgaaatggtccatcaaaaaatggctttcgctgcctggagaaatgcgcccgctgatcctttgcgaatatgcccacgcgatgggtaacagtcttggcggcttcgctaaatactggcaggcgtttcgtcagtacccccgtttacagggcggcttcgtctgggactgggtggatcagtcgctgattaaatatgatgaaaacggcaacccgtggtcggcttacggcggtgattttggcgatacgccgaacgatcgccagttctgtatgaacggtctggtctttgccgaccgcacgccgcatccggcgctgacggaagcaaaacaccaacagcagtatttccagttccgtttatccgggcgaaccatcgaagtgaccagcgaatacctgttccgtcatagcgataacgagttcctgcactggatggtggcactggatggcaagccgctggcaagcggtgaagtgcctctggatgttggcccgcaaggtaagcagttgattgaactgcctgaactgccgcagccggagagcgccggacaactctggctaacggtacgcgtagtgcaaccaaacgcgaccgcatggtcagaagccggacacatcagcgcctggcagcaatggcgtctggcggaaaacctcagcgtgacactcccctccgcgtcccacgccatccctcaactgaccaccagcggaacggatttttgcatcgagctgggtaataagcgttggcaatttaaccgccagtcaggctttctttcacagatgtggattggcgatgaaaaacaactgctgaccccgctgcgcgatcagttcacccgtgcgccgctggataacgacattggcgtaagtgaagcgacccgcattgaccctaacgcctgggtcgaacgctggaaggcggcgggccattaccaggccgaagcggcgttgttgcagtgcacggcagatacacttgccgacgcggtgctgattacaaccgcccacgcgtggcagcatcaggggaaaaccttatttatcagccggaaaacctaccggattgatgggcacggtgagatggtcatcaatgtggatgttgcggtggcaagcgatacaccgcatccggcgcggattggcctgacctgccagctggcgcaggtctcagagcgggtaaactggctcggcctggggccgcaagaaaactatcccgaccgccttactgcagcctgttttgaccgctgggatctgccattgtcagacatgtataccccgtacgtcttcccgagcgaaaacggtctgcgctgcgggacgcgcgaattgaattatggcccacaccagtggcgcggcgacttccagttcaacatcagccgctacagccaacaacaactgatggaaaccagccatcgccatctgctgcacgcggaagaaggcacatggctgaatatcgacggtttccatatggggattggtggcgacgactcctggagcccgtcagtatcggcggaattccagctgagcgccggtcgctaccattaccagttggtctggtgtcaaaaataa

SEQ ID NO: 255 - DNA, 2149 bp, Artificial Sequence
  Synthetic
ctctagaaataattttgtttaactttaagaaggagatatacatatgaattatcagaacgacgatttacgcatcaaagaaatcaaagagttacttcctcctgtcgcattgctggaaaaattccccgctactgaaaatgccgcgaatacggtcgcccatgcccgaaaagcgatccataagatcctgaaaggtaatgatgatcgcctgttggtggtgattggcccatgctcaattcatgatcctgtcgcggctaaagagtatgccactcgcttgctgacgctgcgtgaagagctgcaagatgagctggaaatcgtgatgcgcgtctattttgaaaagccgcgtactacggtgggctggaaagggctgattaacgatccgcatatggataacagcttccagatcaacgacggtctgcgtattgcccgcaaattgctgctcgatattaacgacagcggtctgccagcggcgggtgaattcctggatatgatcaccctacaatatctcgctgacctgatgagctggggcgcaattggcgcacgtaccaccgaatcgcaggtgcaccgcgaactggcgtctggtctttcttgtccggtaggtttcaaaaatggcactgatggtacgattaaagtggctatcgatgccattaatgccgccggtgcgccgcactgcttcctgtccgtaacgaaatgggggcattcggcgattgtgaataccagcggtaacggcgattgccatatcattctgcgcggcggtaaagagcctaactacagcgcgaagcacgttgctgaagtgaaagaagggctgaacaaagcaggcctgccagcgcaggtgatgatcgatttcagccatgctaactcgtcaaaacaattcaaaaagcagatggatgtttgtactgacgtttgccagcagattgccggtggcgaaaaggccattattggcgtgatggtggaaagccatctggtggaaggcaatcagagcctcgagagcggggaaccgctggcctacggtaagagcatcaccgatgcctgcattggctgggatgataccgatgctctgttacgtcaactggcgagtgcagtaaaagcgcgtcgcgggtaaatgaattatcagaacgacgatttacgcatcaaagaaatcaaagagttacttcctcctgtcgcattgctggaaaaattccccgctactgaaaatgccgcgaatacggtcgcccatgcccgaaaagcgatccataagatcctgaaaggtaatgatgatcgcctgttggtggtgattggcccatgctcaattcatgatcctgtcgcggctaaagagtatgccactcgcttgctgacgctgcgtgaagagctgcaagatgagctggaaatcgtgatgcgcgtctattttgaaaagccgcgtactacggtgggctggaaagggctgattaacgatccgcatatggataacagcttccagatcaacgacggtctgcgtattgcccgcaaattgctgctcgatattaacgacagcggtctgccagcggcgggtgaattcctggatatgatcaccctacaatatctcgctgacctgatgagctggggcgcaattggcgcacgtaccaccgaatcgcaggtgcaccgcgaactggcgtctggtctttcttgtccggtaggtttcaaaaatggcactgatggtacgattaaagtggctatcgatgccattaatgccgccggtgcgccgcactgcttcctgtccgtaacgaaatgggggcattcggcgattgtgaataccagcggtaacggcgattgccatatcattctgcgcggcggtaaagagcctaactacagcgcgaagcacgttgctgaagtgaaagaagggctgaacaaagcaggcctgccagcgcaggtgatgatcgatttcagccatgctaactcgtcaaaacaattcaaaaagcagatggatgtttgtactgacgtttgccagcagattgccggtggcgaaaaggccattattggcgtgatggtggaaagccatctggtggaaggcaatcagagcctcgagagcggggaaccgctggcctacggtaagagcatcaccgatgcctgcattggctgggatgataccgatgctctgttacgtcaactggcgagtgcagtaaaagcgcgtcgcgggtaa

SEQ ID NO: 256 - DNA, 1053 bp, Artificial Sequence
  Synthetic
atgaattatcagaacgacgatttacgcatcaaagaaatcaaagagttacttcctcctgtcgcattgctggaaaaattccccgctactgaaaatgccgcgaatacggtcgcccatgcccgaaaagcgatccataagatcctgaaaggtaatgatgatcgcctgttggtggtgattggcccatgctcaattcatgatcctgtcgcggctaaagagtatgccactcgcttgctgacgctgcgtgaagagctgcaagatgagctggaaatcgtgatgcgcgtctattttgaaaagccgcgtactacggtgggctggaaagggctgattaacgatccgcatatggataacagcttccagatcaacgacggtctgcgtattgcccgcaaattgctgctcgatattaacgacagcggtctgccagcggcgggtgaattcctggatatgatcaccctacaatatctcgctgacctgatgagctggggcgcaattggcgcacgtaccaccgaatcgcaggtgcaccgcgaactggcgtctggtctttcttgtccggtaggtttcaaaaatggcactgatggtacgattaaagtggctatcgatgccattaatgccgccggtgcgccgcactgcttcctgtccgtaacgaaatgggggcattcggcgattgtgaataccagcggtaacggcgattgccatatcattctgcgcggcggtaaagagcctaactacagcgcgaagcacgttgctgaagtgaaagaagggctgaacaaagcaggcctgccagcgcaggtgatgatcgatttcagccatgctaactcgtcaaaacaattcaaaaagcagatggatgtttgtactgacgtttgccagcagattgccggtggcgaaaaggccattattggcgtgatggtggaaagccatctggtggaaggcaatcagagcctcgagagcggggaaccgctggcctacggtaagagcatcaccgatgcctgcattggctgggatgataccgatgctctgttacgtcaactggcgagtgcagtaaaagcgcgtcgcgggtaa

SEQ ID NO: 257 - DNA, 2351 bp, Artificial Sequence
  Synthetic
ctctagaaataattttgtttaactttaagaaggagatatacatatgaattatcagaacgacgatttacgcatcaaagaaatcaaagagttacttcctcctgtcgcattgctggaaaaattccccgctactgaaaatgccgcgaatacggtcgcccatgcccgaaaagcgatccataagatcctgaaaggtaatgatgatcgcctgttggtggtgattggcccatgctcaattcatgatcctgtcgcggctaaagagtatgccactcgcttgctgacgctgcgtgaagagctgcaagatgagctggaaatcgtgatgcgcgtctattttgaaaagccgcgtactacggtgggctggaaagggctgattaacgatccgcatatggataacagcttccagatcaacgacggtctgcgtattgcccgcaaattgctgctcgatattaacgacagcggtctgccagcggcgggtgaattcctggatatgatcaccctacaatatctcgctgacctgatgagctggggcgcaattggcgcacgtaccaccgaatcgcaggtgcaccgcgaactggcgtctggtctttcttgtccggtaggtttcaaaaatggcactgatggtacgattaaagtggctatcgatgccattaatgccgccggtgcgccgcactgcttcctgtccgtaacgaaatgggggcattcggcgattgtgaataccagcggtaacggcgattgccatatcattctgcgcggcggtaaagagcctaactacagcgcgaagcacgttgctgaagtgaaagaagggctgaacaaagcaggcctgccagcgcaggtgatgatcgatttcagccatgctaactcgtcaaaacaattcaaaaagcagatggatgtttgtactgacgtttgccagcagattgccggtggcgaaaaggccattattggcgtgatggtggaaagccatctggtggaaggcaatcagagcctcgagagcggggaaccgctggcctacggtaagagcatcaccgatgcctgcattggctgggatgataccgatgctctgttacgtcaactggcgagtgcagtaaaagcgcgtcgcgggtaatacttaagaaggagatatacatatggcaaaggtatcgctggagaaagacaagattaagtttctgctggtagaaggcgtgcaccaaaaggcgctggaaagccttcgtgcagctggttacaccaacatcgaatttcacaaaggcgcgctggatgatgaacaattaaaagaatccatccgcgatgcccacttcatcggcctgcgatcccgtacccatctgactgaagacgtgatcaacgccgcagaaaaactggtcgctattggctgtttctgtatcggaacaaatcaggttgatctggatgcggcggcaaagcgcgggatcccggtatttaacgcaccgttctcaaatacgcgctctgttgcggagctggtgattggcgaactgctgctgctattgcgcggcgtgccagaagccaatgctaaagcgcatcgtggcgtgtggaacaaactggcggcgggttcttttgaagcgcgcggcaaaaagctgggtatcatcggctacggtcatattggtacgcaattgggcattctggctgaatcgctgggaatgtatgtttacttttatgatattgaaaacaaactgccgctgggcaacgccactcaggtacagcatctttctgacctgctgaatatgagcgatgtggtgagtctgcatgtaccagagaatccgtccaccaaaaatatgatgggcgcgaaagagatttcgctaatgaagcccggctcgctgctgattaatgcttcgcgcggtactgtggtggatattccagcgctgtgtgacgcgctggcgagcaaacatctggcgggggcggcaatcgacgtattcccgacggaaccggcgaccaatagcgatccatttacctctccgctgtgtgaattcgacaatgtccttctgacgccacacattggcggttcgactcaggaagcgcaggagaatatcggcttggaagttgcgggtaaattgatcaagtattctgacaatggctcaacgctctctgcggtgaacttcccggaagtctcgctgccactgcacggtgggcgtcgtctgatgcacatccacgaaaaccgtccgggcgtgctaactgcgctcaacaaaatttttgccgagcagggcgtcaacatcgccgcgcaatatctacaaacttccgcccagatgggttatgtagttattgatattgaagccgacgaagacgttgccgaaaaagcgctgcaggcaatgaaagctattccgggtaccattcgcgcccgtctgctgtactaa

SEQ ID NO: 258 - DNA, 1233 bp, Artificial Sequence
  Synthetic
atggcaaaggtatcgctggagaaagacaagattaagtttctgctggtagaaggcgtgcaccaaaaggcgctggaaagccttcgtgcagctggttacaccaacatcgaatttcacaaaggcgcgctggatgatgaacaattaaaagaatccatccgcgatgcccacttcatcggcctgcgatcccgtacccatctgactgaagacgtgatcaacgccgcagaaaaactggtcgctattggctgtttctgtatcggaacaaatcaggttgatctggatgcggcggcaaagcgcgggatcccggtatttaacgcaccgttctcaaatacgcgctctgttgcggagctggtgattggcgaactgctgctgctattgcgcggcgtgccagaagccaatgctaaagcgcatcgtggcgtgtggaacaaactggcggcgggttcttttgaagcgcgcggcaaaaagctgggtatcatcggctacggtcatattggtacgcaattgggcattctggctgaatcgctgggaatgtatgtttacttttatgatattgaaaacaaactgccgctgggcaacgccactcaggtacagcatctttctgacctgctgaatatgagcgatgtggtgagtctgcatgtaccagagaatccgtccaccaaaaatatgatgggcgcgaaagagatttcgctaatgaagcccggctcgctgctgattaatgcttcgcgcggtactgtggtggatattccagcgctgtgtgacgcgctggcgagcaaacatctggcgggggcggcaatcgacgtattcccgacggaaccggcgaccaatagcgatccatttacctctccgctgtgtgaattcgacaatgtccttctgacgccacacattggcggttcgactcaggaagcgcaggagaatatcggcttggaagttgcgggtaaattgatcaagtattctgacaatggctcaacgctctctgcggtgaacttcccggaagtctcgctgccactgcacggtgggcgtcgtctgatgcacatccacgaaaaccgtccgggcgtgctaactgcgctcaacaaaatttttgccgagcagggcgtcaacatcgccgcgcaatatctacaaacttccgcccagatgggttatgtagttattgatattgaagccgacgaagacgttgccgaaaaagcgctgcaggcaatgaaagctattccgggtaccattcgcgcccgtctgctgtactaa

SEQ ID NO: 259 - DNA, 2621 bp, C. roseus
ctctagaaataattttgtttaactttaagaaggagatatacatatgaattatcagaacgacgatttacgcatcaaagaaatcaaagagttacttcctcctgtcgcattgctggaaaaattccccgctactgaaaatgccgcgaatacggtcgcccatgcccgaaaagcgatccataagatcctgaaaggtaatgatgatcgcctgttggtggtgattggcccatgctcaattcatgatcctgtcgcggctaaagagtatgccactcgcttgctgacgctgcgtgaagagctgcaagatgagctggaaatcgtgatgcgcgtctattttgaaaagccgcgtactacggtgggctggaaagggctgattaacgatccgcatatggataacagcttccagatcaacgacggtctgcgtattgcccgcaaattgctgctcgatattaacgacagcggtctgccagcggcgggtgaattcctggatatgatcaccctacaatatctcgctgacctgatgagctggggcgcaattggcgcacgtaccaccgaatcgcaggtgcaccgcgaactggcgtctggtctttcttgtccggtaggtttcaaaaatggcactgatggtacgattaaagtggctatcgatgccattaatgccgccggtgcgccgcactgcttcctgtccgtaacgaaatgggggcattcggcgattgtgaataccagcggtaacggcgattgccatatcattctgcgcggcggtaaagagcctaactacagcgcgaagcacgttgctgaagtgaaagaagggctgaacaaagcaggcctgccagcgcaggtgatgatcgatttcagccatgctaactcgtcaaaacaattcaaaaagcagatggatgtttgtactgacgtttgccagcagattgccggtggcgaaaaggccattattggcgtgatggtggaaagccatctggtggaaggcaatcagagcctcgagagcggggaaccgctggcctacggtaagagcatcaccgatgcctgcattggctgggatgataccgatgctctgttacgtcaactggcgagtgcagtaaaagcgcgtcgcgggtaatacttaagaaggagatatacatatgggttctattgactcgacgaatgtggccatgtctaattctcctgttggcgagtttaagccccttgaagcagaagagttccgtaaacaggcacaccgcatggtggattttattgcggattattacaagaacgtagaaacatacccggtcctttccgaggttgaacccggctatctgcgcaaacgtattcccgaaaccgcaccatacctgccggagccacttgatgatattatgaaggatattcaaaaggacattatccccggaatgacgaactggatgtccccgaacttttacgccttcttcccggccacagttagctcagcagctttcttgggggaaatgctttcaacggcccttaacagcgtaggatttacctgggtcagttccccggcagcgactgaattagagatgatcgttatggattggcttgcgcaaattttgaaacttccaaaaagctttatgttctccggaaccgggggtggtgtcatccaaaacactacgtcagagtcgatcttgtgcactattatcgcggcccgtgaacgcgccttggaaaaattgggccctgattcaattggtaagcttgtctgctatgggtccgatcaaacgcacacaatgtttccgaaaacctgtaagttagcaggaatttatccgaataatatccgccttatccctaccacggtagaaaccgactttggcatctcaccgcaggtacttcgcaagatggtcgaagacgacgtcgctgcggggtacgttcccttatttttgtgtgccaccttgggaacgacatcaactacggcaacagatcctgtagattcgctgtccgaaatcgcaaacgagtttggtatctggattcatgtcgacgccgcatatgctggatcggcttgcatctgcccagaatttcgtcactaccttgatggcatcgaacgtgtggattccttatcgctgtctccccacaaatggcttttagcatatctggattgcacgtgcttgtgggtaaaacaacctcacctgctgcttcgcgctttaacgactaatcccgaatacttgaagaataaacagagtgatttagataaggtcgtggattttaagaactggcagatcgcaacaggacgtaagttccgctctttaaaactttggttaattctgcgttcctacggggtagttaacctgcaaagtcatatccgtagtgatgtagcgatggggaagatgtttgaggaatgggtccgttccgatagccgctttgaaatcgtcgtgccacgtaatttttcgcttgtatgctttcgcttgaaaccggatgtatctagtttacatgtcgaggaggtcaacaagaagttgttggatatgcttaactccaccggtcgcgtatatatgacgcatacaattgttggcggaatctatatgttacgtttggctgtaggtagcagcttgacagaggaacatcacgtgcgccgcgtttgggacttgatccagaagcttacggacgacctgcttaaagaggcgtga

SEQ ID NO: 260 - DNA, 1503 bp, C. roseus
atgggttctattgactcgacgaatgtggccatgtctaattctcctgttggcgagtttaagccccttgaagcagaagagttccgtaaacaggcacaccgcatggtggattttattgcggattattacaagaacgtagaaacatacccggtcctttccgaggttgaacccggctatctgcgcaaacgtattcccgaaaccgcaccatacctgccggagccacttgatgatattatgaaggatattcaaaaggacattatccccggaatgacgaactggatgtccccgaacttttacgccttcttcccggccacagttagctcagcagctttcttgggggaaatgctttcaacggcccttaacagcgtaggatttacctgggtcagttccccggcagcgactgaattagagatgatcgttatggattggcttgcgcaaattttgaaacttccaaaaagctttatgttctccggaaccgggggtggtgtcatccaaaacactacgtcagagtcgatcttgtgcactattatcgcggcccgtgaacgcgccttggaaaaattgggccctgattcaattggtaagcttgtctgctatgggtccgatcaaacgcacacaatgtttccgaaaacctgtaagttagcaggaatttatccgaataatatccgccttatccctaccacggtagaaaccgactttggcatctcaccgcaggtacttcgcaagatggtcgaagacgacgtcgctgcggggtacgttcccttatttttgtgtgccaccttgggaacgacatcaactacggcaacagatcctgtagattcgctgtccgaaatcgcaaacgagtttggtatctggattcatgtcgacgccgcatatgctggatcggcttgcatctgcccagaatttcgtcactaccttgatggcatcgaacgtgtggattccttatcgctgtctccccacaaatggcttttagcatatctggattgcacgtgcttgtgggtaaaacaacctcacctgctgcttcgcgctttaacgactaatcccgaatacttgaagaataaacagagtgatttagataaggtcgtggattttaagaactggcagatcgcaacaggacgtaagttccgctctttaaaactttggttaattctgcgttcctacggggtagttaacctgcaaagtcatatccgtagtgatgtagcgatggggaagatgtttgaggaatgggtccgttccgatagccgctttgaaatcgtcgtgccacgtaatttttcgcttgtatgctttcgcttgaaaccggatgtatctagtttacatgtcgaggaggtcaacaagaagttgttggatatgcttaactccaccggtcgcgtatatatgacgcatacaattgttggcggaatctatatgttacgtttggctgtaggtagcagcttgacagaggaacatcacgtgcgccgcgtttgggacttgatccagaagcttacggacgacctgcttaaagaggcgtga

SEQ ID NO: 261 - DNA, 2372 bp, Clostridium sporogenes
ctctagaaataattttgtttaactttaagaaggagatatacatatgaattatcagaacgacgatttacgcatcaaagaaatcaaagagttacttcctcctgtcgcattgctggaaaaattccccgctactgaaaatgccgcgaatacggtcgcccatgcccgaaaagcgatccataagatcctgaaaggtaatgatgatcgcctgttggtggtgattggcccatgctcaattcatgatcctgtcgcggctaaagagtatgccactcgcttgctgacgctgcgtgaagagctgcaagatgagctggaaatcgtgatgcgcgtctattttgaaaagccgcgtactacggtgggctggaaagggctgattaacgatccgcatatggataacagcttccagatcaacgacggtctgcgtattgcccgcaaattgctgctcgatattaacgacagcggtctgccagcggcgggtgaattcctggatatgatcaccctacaatatctcgctgacctgatgagctggggcgcaattggcgcacgtaccaccgaatcgcaggtgcaccgcgaactggcgtctggtctttcttgtccggtaggtttcaaaaatggcactgatggtacgattaaagtggctatcgatgccattaatgccgccggtgcgccgcactgcttcctgtccgtaacgaaatgggggcattcggcgattgtgaataccagcggtaacggcgattgccatatcattctgcgcggcggtaaagagcctaactacagcgcgaagcacgttgctgaagtgaaagaagggctgaacaaagcaggcctgccagcgcaggtgatgatcgatttcagccatgctaactcgtcaaaacaattcaaaaagcagatggatgtttgtactgacgtttgccagcagattgccggtggcgaaaaggccattattggcgtgatggtggaaagccatctggtggaaggcaatcagagcctcgagagcggggaaccgctggcctacggtaagagcatcaccgatgcctgcattggctgggatgataccgatgctctgttacgtcaactggcgagtgcagtaaaagcgcgtcgcgggtaatacttaagaaggagatatacatatgaaattttggcgcaagtatacgcaacaggagatggatgagaaaatcacagaatcgcttgagaagacattaaattacgataacacgaaaaccatcggcatcccaggtactaagctggatgatactgtattttatgacgatcactccttcgttaagcactctccctatttacgtacgttcatccaaaaccctaatcacattggttgtcacacgtacgataaagcagacatcttgtttggcggcacgtttgacatcgaacgcgaactgattcagcttttggccatcgatgtcttaaacggaaatgatgaggaattcgatggatatgtgacacaggggggaaccgaggcgaatattcaggcaatgtgggtttatcgtaactatttcaaaaaagaacgtaaagcaaaacatgaggaaatcgcaatcatcacgagcgcggatacccattacagtgcatataaggggagcgacttgctgaacattgatattatcaaggtcccagtagacttctattcgcgtaagatccaggagaacacgttagactcgattgtcaaggaggcgaaggaaattggaaagaagtacttcattgtcatctcaaacatgggtacgactatgtttggcagtgtagacgaccctgatctttatgctaacatttttgataagtataacttagaatacaaaatccacgtcgatggagcttttgggggtttcatttatcctatcgataataaggagtgcaaaacagatttctcgaacaagaacgtctcatccatcacgcttgacggtcacaaaatgcttcaagccccctatgggactggtatcttcgtgtcacgtaagaacttgatccataacaccctgacaaaggaagcaacgtatattgaaaacctggacgttaccctgagtgggtcccgctccggatccaacgccgttgcgatctggatggttttagcctcttatggcccctacgggtggatggagaagattaacaagttgcgcaatcgcactaagtggctttgcaagcagcttaacgacatgcgcatcaaatactataaggaggatagcatgaatatcgtcacgattgaagagcaatacgtaaataaagagattgcagagaaatacttccttgtgcctgaagtacacaatcctaccaacaattggtacaagattgtagtcatggaacatgttgaacttgacatcttgaactcccttgtttatgatttacgtaaattcaacaaggagcacctgaaggcaatgtga

SEQ ID NO: 262 - DNA, 1254 bp, Clostridium sporogenes
atgaaattttggcgcaagtatacgcaacaggagatggatgagaaaatcacagaatcgcttgagaagacattaaattacgataacacgaaaaccatcggcatcccaggtactaagctggatgatactgtattttatgacgatcactccttcgttaagcactctccctatttacgtacgttcatccaaaaccctaatcacattggttgtcacacgtacgataaagcagacatcttgtttggcggcacgtttgacatcgaacgcgaactgattcagcttttggccatcgatgtcttaaacggaaatgatgaggaattcgatggatatgtgacacaggggggaaccgaggcgaatattcaggcaatgtgggtttatcgtaactatttcaaaaaagaacgtaaagcaaaacatgaggaaatcgcaatcatcacgagcgcggatacccattacagtgcatataaggggagcgacttgctgaacattgatattatcaaggtcccagtagacttctattcgcgtaagatccaggagaacacgttagactcgattgtcaaggaggcgaaggaaattggaaagaagtacttcattgtcatctcaaacatgggtacgactatgtttggcagtgtagacgaccctgatctttatgctaacatttttgataagtataacttagaatacaaaatccacgtcgatggagcttttgggggtttcatttatcctatcgataataaggagtgcaaaacagatttctcgaacaagaacgtctcatccatcacgcttgacggtcacaaaatgcttcaagccccctatgggactggtatcttcgtgtcacgtaagaacttgatccataacaccctgacaaaggaagcaacgtatattgaaaacctggacgttaccctgagtgggtcccgctccggatccaacgccgttgcgatctggatggttttagcctcttatggcccctacgggtggatggagaagattaacaagttgcgcaatcgcactaagtggctttgcaagcagcttaacgacatgcgcatcaaatactataaggaggatagcatgaatatcgtcacgattgaagagcaatacgtaaataaagagattgcagagaaatacttccttgtgcctgaagtacacaatcctaccaacaattggtacaagattgtagtcatggaacatgttgaacttgacatcttgaactcccttgtttatgatttacgtaaattcaacaaggagcacctgaaggcaatgtga

SEQ ID NO: 263 - DNA, 5377 bp, Artificial Sequence
  Synthetic
ctctagaaataattttgtttaactttaagaaggagatatacatatgaattatcagaacgacgatttacgcatcaaagaaatcaaagagttacttcctcctgtcgcattgctggaaaaattccccgctactgaaaatgccgcgaatacggtcgcccatgcccgaaaagcgatccataagatcctgaaaggtaatgatgatcgcctgttggtggtgattggcccatgctcaattcatgatcctgtcgcggctaaagagtatgccactcgcttgctgacgctgcgtgaagagctgcaagatgagctggaaatcgtgatgcgcgtctattttgaaaagccgcgtactacggtgggctggaaagggctgattaacgatccgcatatggataacagcttccagatcaacgacggtctgcgtattgcccgcaaattgctgctcgatattaacgacagcggtctgccagcggcgggtgaattcctggatatgatcaccctacaatatctcgctgacctgatgagctggggcgcaattggcgcacgtaccaccgaatcgcaggtgcaccgcgaactggcgtctggtctttcttgtccggtaggtttcaaaaatggcactgatggtacgattaaagtggctatcgatgccattaatgccgccggtgcgccgcactgcttcctgtccgtaacgaaatgggggcattcggcgattgtgaataccagcggtaacggcgattgccatatcattctgcgcggcggtaaagagcctaactacagcgcgaagcacgttgctgaagtgaaagaagggctgaacaaagcaggcctgccagcgcaggtgatgatcgatttcagccatgctaactcgtcaaaacaattcaaaaagcagatggatgtttgtactgacgtttgccagcagattgccggtggcgaaaaggccattattggcgtgatggtggaaagccatctggtggaaggcaatcagagcctcgagagcggggaaccgctggcctacggtaagagcatcaccgatgcctgcattggctgggatgataccgatgctctgttacgtcaactggcgagtgcagtaaaagcgcgtcgcgggtaatacttaagaaggagatatacatatgctgttattcgagactgtgcgtgaaatgggtcatgagcaagtccttttctgtcatagcaagaatcccgagatcaaggcaattatcgcaatccacgataccaccttaggaccggctatgggcgcaactcgtatcttaccttatattaatgaggaggctgccctgaaagatgcattacgtctgtcccgcggaatgacttacaaagcagcctgcgccaatattcccgccgggggcggcaaagccgtcatcatcgctaaccccgaaaacaagaccgatgacctgttacgcgcatacggccgtttcgtggacagcttgaacggccgtttcatcaccgggcaggacgttaacattacgcccgacgacgttcgcactatttcgcaggagactaagtacgtggtaggcgtctcagaaaagtcgggagggccggcacctatcacctctctgggagtatttttaggcatcaaagccgctgtagagtcgcgttggcagtctaaacgcctggatggcatgaaagtggcggtgcaaggacttgggaacgtaggaaaaaatctttgtcgccatctgcatgaacacgatgtacaactttttgtgtctgatgtcgatccaatcaaggccgaggaagtaaaacgcttattcggggcgactgttgtcgaaccgactgaaatctattctttagatgttgatatttttgcaccgtgtgcacttgggggtattttgaatagccataccatcccgttcttacaagcctcaatcatcgcaggagcagcgaataaccagctggagaacgagcaacttcattcgcagatgcttgcgaaaaagggtattctttactcaccagactacgttatcaatgcaggaggacttatcaatgtttataacgaaatgatcggatatgacgaggaaaaagcattcaaacaagttcataacatctacgatacgttattagcgattttcgaaattgcaaaagaacaaggtgtaaccaccaacgacgcggcccgtcgtttagcagaggatcgtatcaacaactccaaacgctcaaagagtaaagcgattgcggcgtgaaatgtaagaaggagatatacatatgcgtacaccctactgtgtcgccgattatcttttagatcgtctgacggactgcggggccgatcacctgtttggcgtaccgggcgattacaacttgcagtttctggaccacgtcattgactcaccagatatctgctgggtagggtgtgcgaacgagcttaacgcgagctacgctgctgacggatatgcgcgttgtaaaggctttgctgcacttcttactaccttcggggtcggtgagttatcggcgatgaacggtatcgcaggctcgtacgctgagcacgtcccggtattacacattgtgggagctccgggtaccgcagctcaacagcgcggagaactgttacaccacacgctgggcgacggagaattccgccacttttaccatatgtccgagccaattactgtagcccaggctgtacttacagagcaaaatgcctgttacgagatcgaccgtgttttgaccacgatgcttcgcgagcgccgtcccgggtatttgatgctgccagccgatgttgccaaaaaagctgcgacgcccccagtgaatgccctgacgcataaacaagctcatgccgattccgcctgtttaaaggcttttcgcgatgcagctgaaaataaattagccatgtcgaaacgcaccgccttgttggcggactttctggtcctgcgccatggccttaaacacgcccttcagaaatgggtcaaagaagtcccgatggcccacgctacgatgcttatgggtaaggggatttttgatgaacgtcaagcgggattttatggaacttattccggttcggcgagtacgggggcggtaaaggaagcgattgagggagccgacacagttctttgcgtggggacacgtttcaccgatacactgaccgctggattcacacaccaacttactccggcacaaacgattgaggtgcaaccccatgcggctcgcgtgggggatgtatggtttacgggcattccaatgaatcaagccattgagactcttgtcgagctgtgcaaacagcacgtccacgcaggactgatgagttcgagctctggggcgattccttttccacaaccagatggtagtttaactcaagaaaacttctggcgcacattgcaaacctttatccgcccaggtgatatcatcttagcagaccagggtacttcagcctttggagcaattgacctgcgcttaccagcagacgtgaactttattgtgcagccgctgtgggggtctattggttatactttagctgcggccttcggagcgcagacagcgtgtccaaaccgtcgtgtgatcgtattgacaggagatggagcagcgcagttgaccattcaggagttaggctcgatgttacgcgataagcagcaccccattatcctggtcctgaacaatgaggggtatacagttgaacgcgccattcatggtgcggaacaacgctacaatgacatcgctttatggaattggacgcacatcccccaagccttatcgttagatccccaatcggaatgttggcgtgtgtctgaagcagagcaactggctgatgttctggaaaaagttgctcatcatgaacgcctgtcgttgatcgaggtaatgttgcccaaggccgatatccctccgttactgggagccttgaccaaggctttagaagcctgcaacaacgcttaaaggttaagaaggagatatacatatgcccaccttgaacttggacttacccaacggtattaagagcacgattcaggcagaccttttcatcaataataagtttgtgccggcgcttgatgggaaaacgttcgcaactattaatccgtctacggggaaagagatcggacaggtggcagaggcttcggcgaaggatgtggatcttgcagttaaggccgcgcgtgaggcgtttgaaactacttggggggaaaacacgccaggtgatgctcgtggccgtttactgattaagcttgctgagttggtggaagcgaatattgatgagttagcggcaattgaatcactggacaatgggaaagcgttctctattgctaagtcattcgacgtagctgctgtggccgcaaacttacgttactacggcggttgggctgataaaaaccacggtaaagtcatggaggtagacacaaagcgcctgaactatacccgccacgagccgatcggggtttgcggacaaatcattccgtggaatttcccgcttttgatgtttgcatggaagctgggtcccgctttagccacagggaacacaattgtgttaaagactgccgagcagactcccttaagtgctatcaagatgtgtgaattaatcgtagaagccggctttccgcccggagtagttaatgtgatctcgggattcggaccggtggcgggggccgcgatctcgcaacacatggacatcgataagattgcctttacaggatcgacattggttggccgcaacattatgaaggcagctgcgtcgactaacttaaaaaaggttacacttgagttaggaggaaaatccccgaatatcattttcaaagatgccgaccttgaccaagctgttcgctggagcgccttcggtatcatgtttaaccacggacaatgctgctgcgctggatcgcgcgtatatgtggaagaatccatctatgacgccttcatggaaaaaatgactgcgcattgtaaggcgcttcaagttggagatcctttcagcgcgaacaccttccaaggaccacaagtctcgcagttacaatacgaccgtatcatggaatacatcgaatcagggaaaaaagatgcaaatcttgctttaggcggcgttcgcaaagggaatgaggggtatttcattgagccaactatttttacagacgtgccgcacgacgcgaagattgccaaagaggagatcttcggtccagtggttgttgtgtcgaaatttaaggacgaaaaagatctgatccgtatcgcaaatgattctatttatggtttagctgcggcagtcttttcccgcgacatcagccgcgcgatcgagacagcacacaaactgaaagcaggcacggtctgggtcaactgctataatcagcttattccgcaggtgccattcggagggtataaggcttccggtatcggccgtgagttgggggaatatgccttgtctaattacacaaatatcaaggccgtccacgttaacctttctcaaccggcgcccatttga

SEQ ID NO: 264 - DNA, 1062 bp, Artificial Sequence
  Synthetic
atgctgttattcgagactgtgcgtgaaatgggtcatgagcaagtccttttctgtcatagcaagaatcccgagatcaaggcaattatcgcaatccacgataccaccttaggaccggctatgggcgcaactcgtatcttaccttatattaatgaggaggctgccctgaaagatgcattacgtctgtcccgcggaatgacttacaaagcagcctgcgccaatattcccgccgggggcggcaaagccgtcatcatcgctaaccccgaaaacaagaccgatgacctgttacgcgcatacggccgtttcgtggacagcttgaacggccgtttcatcaccgggcaggacgttaacattacgcccgacgacgttcgcactatttcgcaggagactaagtacgtggtaggcgtctcagaaaagtcgggagggccggcacctatcacctctctgggagtatttttaggcatcaaagccgctgtagagtcgcgttggcagtctaaacgcctggatggcatgaaagtggcggtgcaaggacttgggaacgtaggaaaaaatctttgtcgccatctgcatgaacacgatgtacaactttttgtgtctgatgtcgatccaatcaaggccgaggaagtaaaacgcttattcggggcgactgttgtcgaaccgactgaaatctattctttagatgttgatatttttgcaccgtgtgcacttgggggtattttgaatagccataccatcccgttcttacaagcctcaatcatcgcaggagcagcgaataaccagctggagaacgagcaacttcattcgcagatgcttgcgaaaaagggtattctttactcaccagactacgttatcaatgcaggaggacttatcaatgtttataacgaaatgatcggatatgacgaggaaaaagcattcaaacaagttcataacatctacgatacgttattagcgattttcgaaattgcaaaagaacaaggtgtaaccaccaacgacgcggcccgtcgtttagcagaggatcgtatcaacaactccaaacgctcaaagagtaaagcgattgcggcgtga

SEQ ID NO: 265 - DNA, 1659 bp, Artificial Sequence
  Synthetic
atgcgtacaccctactgtgtcgccgattatcttttagatcgtctgacggactgcggggccgatcacctgtttggcgtaccgggcgattacaacttgcagtttctggaccacgtcattgactcaccagatatctgctgggtagggtgtgcgaacgagcttaacgcgagctacgctgctgacggatatgcgcgttgtaaaggctttgctgcacttcttactaccttcggggtcggtgagttatcggcgatgaacggtatcgcaggctcgtacgctgagcacgtcccggtattacacattgtgggagctccgggtaccgcagctcaacagcgcggagaactgttacaccacacgctgggcgacggagaattccgccacttttaccatatgtccgagccaattactgtagcccaggctgtacttacagagcaaaatgcctgttacgagatcgaccgtgttttgaccacgatgcttcgcgagcgccgtcccgggtatttgatgctgccagccgatgttgccaaaaaagctgcgacgcccccagtgaatgccctgacgcataaacaagctcatgccgattccgcctgtttaaaggcttttcgcgatgcagctgaaaataaattagccatgtcgaaacgcaccgccttgttggcggactttctggtcctgcgccatggccttaaacacgcccttcagaaatgggtcaaagaagtcccgatggcccacgctacgatgcttatgggtaaggggatttttgatgaacgtcaagcgggattttatggaacttattccggttcggcgagtacgggggcggtaaaggaagcgattgagggagccgacacagttctttgcgtggggacacgtttcaccgatacactgaccgctggattcacacaccaacttactccggcacaaacgattgaggtgcaaccccatgcggctcgcgtgggggatgtatggtttacgggcattccaatgaatcaagccattgagactcttgtcgagctgtgcaaacagcacgtccacgcaggactgatgagttcgagctctggggcgattccttttccacaaccagatggtagtttaactcaagaaaacttctggcgcacattgcaaacctttatccgcccaggtgatatcatcttagcagaccagggtacttcagcctttggagcaattgacctgcgcttaccagcagacgtgaactttattgtgcagccgctgtgggggtctattggttatactttagctgcggccttcggagcgcagacagcgtgtccaaaccgtcgtgtgatcgtattgacaggagatggagcagcgcagttgaccattcaggagttaggctcgatgttacgcgataagcagcaccccattatcctggtcctgaacaatgaggggtatacagttgaacgcgccattcatggtgcggaacaacgctacaatgacatcgctttatggaattggacgcacatcccccaagccttatcgttagatccccaatcggaatgttggcgtgtgtctgaagcagagcaactggctgatgttctggaaaaagttgctcatcatgaacgcctgtcgttgatcgaggtaatgttgcccaaggccgatatccctccgttactgggagccttgaccaaggctttagaagcctgcaacaacgcttaa

SEQ ID NO: 266 - DNA, 1494 bp, Artificial Sequence
  Synthetic
atgcccaccttgaacttggacttacccaacggtattaagagcacgattcaggcagaccttttcatcaataataagtttgtgccggcgcttgatgggaaaacgttcgcaactattaatccgtctacggggaaagagatcggacaggtggcagaggcttcggcgaaggatgtggatcttgcagttaaggccgcgcgtgaggcgtttgaaactacttggggggaaaacacgccaggtgatgctcgtggccgtttactgattaagcttgctgagttggtggaagcgaatattgatgagttagcggcaattgaatcactggacaatgggaaagcgttctctattgctaagtcattcgacgtagctgctgtggccgcaaacttacgttactacggcggttgggctgataaaaaccacggtaaagtcatggaggtagacacaaagcgcctgaactatacccgccacgagccgatcggggtttgcggacaaatcattccgtggaatttcccgcttttgatgtttgcatggaagctgggtcccgctttagccacagggaacacaattgtgttaaagactgccgagcagactcccttaagtgctatcaagatgtgtgaattaatcgtagaagccggctttccgcccggagtagttaatgtgatctcgggattcggaccggtggcgggggccgcgatctcgcaacacatggacatcgataagattgcctttacaggatcgacattggttggccgcaacattatgaaggcagctgcgtcgactaacttaaaaaaggttacacttgagttaggaggaaaatccccgaatatcattttcaaagatgccgaccttgaccaagctgttcgctggagcgccttcggtatcatgtttaaccacggacaatgctgctgcgctggatcgcgcgtatatgtggaagaatccatctatgacgccttcatggaaaaaatgactgcgcattgtaaggcgcttcaagttggagatcctttcagcgcgaacaccttccaaggaccacaagtctcgcagttacaatacgaccgtatcatggaatacatcgaatcagggaaaaaagatgcaaatcttgctttaggcggcgttcgcaaagggaatgaggggtatttcattgagccaactatttttacagacgtgccgcacgacgcgaagattgccaaagaggagatcttcggtccagtggttgttgtgtcgaaatttaaggacgaaaaagatctgatccgtatcgcaaatgattctatttatggtttagctgcggcagtcttttcccgcgacatcagccgcgcgatcgagacagcacacaaactgaaagcaggcacggtctgggtcaactgctataatcagcttattccgcaggtgccattcggagggtataaggcttccggtatcggccgtgagttgggggaatatgccttgtctaattacacaaatatcaaggccgtccacgttaacctttctcaaccggcgcccatttga

SEQ ID NO: 267 - DNA, 6573 bp, Artificial Sequence
  Synthetic
ctctagaaataattttgtttaactttaagaaggagatatacatatgcaaacacaaaaaccgactctcgaactgctaacctgcgaaggcgcttatcgcgacaacccgactgcgctttttcaccagttgtgtggggatcgtccggcaacgctgctgctggaatccgcagatatcgacagcaaagatgatttaaaaagcctgctgctggtagacagtgcgctgcgcattacagcattaagtgacactgtcacaatccaggcgctttccggcaatggagaagccctgttgacactactggataacgccttgcctgcgggtgtggaaaatgaacaatcaccaaactgccgcgtactgcgcttcccgcctgtcagtccactgctggatgaagacgcccgcttatgctccctttcggtttttgacgctttccgcttattacagaatctgttgaatgtaccgaaggaagaacgagaagcaatgttcttcggcggcctgttctcttatgaccttgtggcgggatttgaaaatttaccgcaactgtcagcggaaaatagctgccctgatttctgtttttatctcgctgaaacgctgatggtgattgaccatcagaaaaaaagcactcgtattcaggccagcctgtttgctccgaatgaagaagaaaaacaacgtctcactgctcgcctgaacgaactacgtcagcaactgaccgaagccgcgccgccgctgccggtggtttccgtgccgcatatgcgttgtgaatgtaaccagagcgatgaagagttcggtggtgtagtgcgtttgttgcaaaaagcgattcgcgccggagaaattttccaggtggtgccatctcgccgtttctctctgccctgcccgtcaccgctggcagcctattacgtgctgaaaaagagtaatcccagcccgtacatgttttttatgcaggataatgatttcaccctgtttggcgcgtcgccggaaagttcgctcaagtatgacgccaccagccgccagattgagatttacccgattgccggaacacgtccacgcggtcgtcgtgccgatggttcgctggacagagacctcgacagccgcatcgaactggagatgcgtaccgatcataaagagctttctgaacatctgatgctggtggatctcgcccgtaatgacctggcacgcatttgcacacccggcagccgctacgtcgccgatctcaccaaagttgaccgttactcttacgtgatgcacctagtctcccgcgttgttggtgagctgcgccacgatctcgacgccctgcacgcttaccgcgcctgtatgaatatggggacgttaagcggtgcaccgaaagtacgcgctatgcagttaattgccgaagcagaaggtcgtcgacgcggcagctacggcggcgcggtaggttattttaccgcgcatggcgatctcgacacctgcattgtgatccgctcggcgctggtggaaaacggtatcgccaccgtgcaagccggtgctggcgtagtccttgattctgttccgcagtcggaagccgacgaaactcgtaataaagcccgcgctgtactgcgcgctattgccaccgcgcatcatgcacaggagacgttctaatggctgacattctgctgctcgataatatcgactcttttacgtacaacctggcagatcagttgcgcagcaatggtcataacgtggtgatttaccgcaaccatattccggcgcagaccttaattgaacgcctggcgacgatgagcaatccggtgctgatgctttctcctggccccggtgtgccgagcgaagccggttgtatgccggaactcctcacccgcttgcgtggcaagctgccaattattggcatttgcctcggacatcaggcgattgtcgaagcttacgggggctatgtcggtcaggcgggcgaaattcttcacggtaaagcgtcgagcattgaacatgacggtcaggcgatgtttgccggattaacaaacccgctgccagtggcgcgttatcactcgctggttggcagtaacattccggccggtttaaccatcaacgcccattttaatggcatggtgatggcggtgcgtcacgatgcagatcgcgtttgtggattccagttccatccggaatccattcttactacccagggcgctcgcctgctggaacaaacgctggcctgggcgcagcagaaactagagccaaccaacacgctgcaaccgattctggaaaaactgtatcaggcacagacgcttagccaacaagaaagccaccagctgttttcagcggtggtacgtggcgagctgaagccggaacaactggcggcggcgctggtgagcatgaaaattcgcggtgaacacccgaacgagatcgccggggcagcaaccgcgctactggaaaacgccgcgccattcccgcgcccggattatctgtttgccgatatcgtcggtactggcggtgacggcagcaacagcatcaatatttctaccgccagtgcgtttgtcgccgcggcctgcgggctgaaagtggcgaaacacggcaaccgtagcgtctccagtaaatccggctcgtcggatctgctggcggcgttcggtattaatcttgatatgaacgccgataaatcgcgccaggcgctggatgagttaggcgtctgtttcctctttgcgccgaagtatcacaccggattccgccatgcgatgccggttcgccagcaactgaaaacccgcactctgttcaacgtgctgggaccattgattaacccggcgcatccgccgctggcgctaattggtgtttatagtccggaactggtgctgccgattgccgaaaccttgcgcgtgctggggtatcaacgcgcggcagtggtgcacagcggcgggatggatgaagtttcattacacgcgccgacaatcgttgccgaactacatgacggcgaaattaagagctatcaattgaccgctgaagattttggcctgacaccctaccaccaggagcaattggcaggcggaacaccggaagaaaaccgtgacattttaacacgcttgttacaaggtaaaggcgacgccgcccatgaagcagccgtcgcggcgaatgtcgccatgttaatgcgcctgcatggccatgaagatctgcaagccaatgcgcaaaccgttcttgaggtactgcgcagtggttccgcttacgacagagtcaccgcactggcggcacgagggtaaatgatgcaaaccgttttagcgaaaatcgtcgcagacaaggcgatttgggtagaaacccgcaaagagcagcaaccgctggccagttttcagaatgaggttcagccgagcacgcgacatttttatgatgcacttcagggcgcacgcacggcgtttattctggagtgtaaaaaagcgtcgccgtcaaaaggcgtgatccgtgatgatttcgatccggcacgcattgccgccatttataaacattacgcttcggcaatttcagtgctgactgatgagaaatattttcaggggagctttgatttcctccccatcgtcagccaaatcgccccgcagccgattttatgtaaagacttcattatcgatccttaccagatctatctggcgcgctattaccaggccgatgcctgcttattaatgctttcagtactggatgacgaacaatatcgccagcttgcagccgtcgcccacagtctggagatgggtgtgctgaccgaagtcagtaatgaagaggaactggagcgcgccattgcattgggggcaaaggtcgttggcatcaacaaccgcgatctgcgcgatttgtcgattgatctcaaccgtacccgcgagcttgcgccgaaactggggcacaacgtgacggtaatcagcgaatccggcatcaatacttacgctcaggtgcgcgagttaagccacttcgctaacggctttctgattggttcggcgttgatggcccatgacgatttgaacgccgccgtgcgtcgggtgttgctgggtgagaataaagtatgtggcctgacacgtgggcaagatgctaaagcagcttatgacgcgggcgcgatttacggtgggttgatttttgttgcgacatcaccgcgttgcgtcaacgttgaacaggcgcaggaagtgatggctgcagcaccgttgcagtatgttggcgtgttccgcaatcacgatattgccgatgtggcggacaaagctaaggtgttatcgctggcggcagtgcaactgcatggtaatgaagatcagctgtatatcgacaatctgcgtgaggctctgccagcacacgtcgccatctggaaggctttaagtgtcggtgaaactcttcccgcgcgcgattttcagcacatcgataaatatgtattcgacaacggtcagggcgggagcggacaacgtttcgactggtcactattaaatggtcaatcgcttggcaacgttctgctggcggggggcttaggcgcagataactgcgtggaagcggcacaaaccggctgcgccgggcttgattttaattctgctgtagagtcgcaaccgggtatcaaagacgcacgtcttttggcctcggttttccagacgctgcgcgcatattaaggaaaggaacaatgacaacattacttaacccctattttggtgagtttggcggcatgtacgtgccacaaatcctgatgcctgctctgcgccagctggaagaagcttttgtcagcgcgcaaaaagatcctgaatttcaggctcagttcaacgacctgctgaaaaactatgccgggcgtccaaccgcgctgaccaaatgccagaacattacagccgggacgaacaccacgctgtatctgaagcgcgaagatttgctgcacggcggcgcgcataaaactaaccaggtgctcggtcaggctttactggcgaagcggatgggtaaaactgaaattattgccgaaaccggtgccggtcagcatggcgtggcgtcggcccttgccagcgccctgctcggcctgaaatgccgaatttatatgggtgccaaagacgttgaacgccagtcgcccaacgttttccggatgcgcttaatgggtgcggaagtgatcccggtacatagcggttccgcgaccctgaaagatgcctgtaatgaggcgctacgcgactggtccggcagttatgaaaccgcgcactatatgctgggtaccgcagctggcccgcatccttacccgaccattgtgcgtgagtttcagcggatgattggcgaagaaacgaaagcgcagattctggaaagagaaggtcgcctgccggatgccgttatcgcctgtgttggcggtggttcgaatgccatcggtatgtttgcagatttcatcaacgaaaccgacgtcggcctgattggtgtggagcctggcggccacggtatcgaaactggcgagcacggcgcaccgttaaaacatggtcgcgtgggcatctatttcggtatgaaagcgccgatgatgcaaaccgaagacgggcaaattgaagagtcttactccatttctgccgggctggatttcccgtccgtcggcccgcaacatgcgtatctcaacagcactggacgcgctgattacgtgtctattaccgacgatgaagccctggaagcctttaaaacgctttgcctgcatgaagggatcatcccggcgctggaatcctcccacgccctggcccatgcgctgaaaatgatgcgcgaaaatccggaaaaagagcagctactggtggttaacctttccggtcgcggcgataaagacatcttcaccgttcacgatattttgaaagcacgaggggaaatctgatggaacgctacgaatctctgtttgcccagttgaaggagcgcaaagaaggcgcattcgttcctttcgtcaccctcggtgatccgggcattgagcagtcgttgaaaattatcgatacgctaattgaagccggtgctgacgcgctggagttaggcatccccttctccgacccactggcggatggcccgacgattcaaaacgccacactgcgtgcttttgcggcgggagtaaccccggcgcagtgctttgagatgctggcactcattcgccagaagcacccgaccattcccatcggccttttgatgtatgccaacctggtgtttaacaaaggcattgatgagttttatgccgagtgcgagaaagtcggcgtcgattcggtgctggttgccgatgtgcccgtggaagagtccgcgcccttccgccaggccgcgttgcgtcataatgtcgcacctatctttatttgcccgccgaatgccgacgatgatttgctgcgccagatagcctcttacggtcgtggttacacctatttgctgtcgcgagcgggcgtgaccggcgcagaaaaccgcgccgcgttacccctcaatcatctggttgcgaagctgaaagagtacaacgctgcgcctccattgcagggatttggtatttccgccccggatcaggtaaaagccgcgattgatgcaggagctgcgggcgcgatttctggttcggccatcgttaaaatcatcgagcaacatattaatgagccagagaaaatgctggcggcactgaaagcttttgtacaaccgatgaaagcggcgacgcgcagtta

SEQ ID NO: 268 - DNA, 1562 bp, Artificial Sequence; identical to SEQ ID NO: 126
  Synthetic

SEQ ID NO: 269 - DNA, 1596 bp, Artificial Sequence; identical to SEQ ID NO: 128
  Synthetic

SEQ ID NO: 270 - DNA, 1359 bp, Artificial Sequence; identical to SEQ ID NO: 130
  Synthetic

SEQ ID NO: 271 - DNA, 1193 bp, Artificial Sequence
  Synthetic
atgacaacattacttaacccctattttggtgagtttggcggcatgtacgtgccacaaatcctgatgcctgctctgcgccagctggaagaagcttttgtcagcgcgcaaaaagatcctgaatttcaggctcagttcaacgacctgctgaaaaactatgccgggcgtccaaccgcgctgaccaaatgccagaacattacagccgggacgaacaccacgctgtatctgaagcgcgaagatttgctgcacggcggcgcgcataaaactaaccaggtgctcggtcaggctttactggcgaagcggatgggtaaaactgaaattattgccgaaaccggtgccggtcagcatggcgtggcgtcggcccttgccagcgccctgctcggcctgaaatgccgaatttatatgggtgccaaagacgttgaacgccagtcgcccaacgttttccggatgcgcttaatgggtgcggaagtgatcccggtacatagcggttccgcgaccctgaaagatgcctgtaatgaggcgctacgcgactggtccggcagttatgaaaccgcgcactatatgctgggtaccgcagctggcccgcatccttacccgaccattgtgcgtgagtttcagcggatgattggcgaagaaacgaaagcgcagattctggaaagagaaggtcgcctgccggatgccgttatcgcctgtgttggcggtggttcgaatgccatcggtatgtttgcagatttcatcaacgaaaccgacgtcggcctgattggtgtggagcctggcggccacggtatcgaaactggcgagcacggcgcaccgttaaaacatggtcgcgtgggcatctatttcggtatgaaagcgccgatgatgcaaaccgaagacgggcaaattgaagagtcttactccatttctgccgggctggatttcccgtccgtcggcccgcaacatgcgtatctcaacagcactggacgcgctgattacgtgtctattaccgacgatgaagccctggaagcctttaaaacgctttgcctgcatgaagggatcatcccggcgctggaatcctcccacgccctggcccatgcgctgaaaatgatgcgcgaaaatccggaaaaagagcagctactggtggttaacctttccggtcgcggcgataaagacatcttcaccgttcacgatattttgaaagcacgaggggaaatctg

SEQ ID NO: 272 - DNA, 807 bp, Artificial Sequence; identical to SEQ ID NO: 134
  Synthetic

SEQ ID NO: 273 - DNA, 6574 bp, Artificial Sequence
  Synthetic
ctctagaaataattttgtttaactttaagaaggagatatacatatgcaaacacaaaaaccgactctcgaactgctaacctgcgaaggcgcttatcgcgacaacccgactgcgctttttcaccagttgtgtggggatcgtccggcaacgctgctgctggaattcgcagatatcgacagcaaagatgatttaaaaagcctgctgctggtagacagtgcgctgcgcattacagcattaagtgacactgtcacaatccaggcgctttccggcaatggagaagccctgttgacactactggataacgccttgcctgcgggtgtggaaaatgaacaatcaccaaactgccgcgtactgcgcttcccgcctgtcagtccactgctggatgaagacgcccgcttatgctccctttcggtttttgacgctttccgcttattacagaatctgttgaatgtaccgaaggaagaacgagaagcaatgttcttcggcggcctgttctcttatgaccttgtggcgggatttgaaaatttaccgcaactgtcagcggaaaatagctgccctgatttctgtttttatctcgctgaaacgctgatggtgattgaccatcagaaaaaaagcactcgtattcaggccagcctgtttgctccgaatgaagaagaaaaacaacgtctcactgctcgcctgaacgaactacgtcagcaactgaccgaagccgcgccgccgctgccggtggtttccgtgccgcatatgcgttgtgaatgtaaccagagcgatgaagagttcggtggtgtagtgcgtttgttgcaaaaagcgattcgcgccggagaaattttccaggtggtgccatctcgccgtttctctctgccctgcccgtcaccgctggcagcctattacgtgctgaaaaagagtaatcccagcccgtacatgttttttatgcaggataatgatttcaccctgtttggcgcgtcgccggaaagttcgctcaagtatgacgccaccagccgccagattgagatttacccgattgccggaacacgtccacgcggtcgtcgtgccgatggttcgctggacagagacctcgacagccgcatcgaactggagatgcgtaccgatcataaagagctttctgaacatctgatgctggtggatctcgcccgtaatgacctggcacgcatttgcacacccggcagccgctacgtcgccgatctcaccaaagttgaccgttactcttacgtgatgcacctagtctcccgcgttgttggtgagctgcgccacgatctcgacgccctgcacgcttaccgcgcctgtatgaatatggggacgttaagcggtgcaccgaaagtacgcgctatgcagttaattgccgaagcagaaggtcgtcgacgcggcagctacggcggcgcggtaggttattttaccgcgcatggcgatctcgacacctgcattgtgatccgctcggcgctggtggaaaacggtatcgccaccgtgcaagccggtgctggcgtagtccttgattctgttccgcagtcggaagccgacgaaactcgtaataaagcccgcgctgtactgcgcgctattgccaccgcgcatcatgcacaggagacgttctaatggctgacattctgctgctcgataatatcgactcttttacgtacaacctggcagatcagttgcgcagcaatggtcataacgtggtgatttaccgcaaccatattccggcgcagaccttaattgaacgcctggcgacgatgagcaatccggtgctgatgctttctcctggccccggtgtgccgagcgaagccggttgtatgccggaactcctcacccgcttgcgtggcaagctgccaattattggcatttgcctcggacatcaggcgattgtcgaagcttacgggggctatgtcggtcaggcgggcgaaattcttcacggtaaagcgtcgagcattgaacatgacggtcaggcgatgtttgccggattaacaaacccgctgccagtggcgcgttatcactcgctggttggcagtaacattccggccggtttaaccatcaacgcccattttaatggcatggtgatggcggtgcgtcacgatgcagatcgcgtttgtggattccagttccatccggaatccattcttactacccagggcgctcgcctgctggaacaaacgctggcctgggcgcagcagaaactagagccaaccaacacgctgcaaccgattctggaaaaactgtatcaggcacagacgcttagccaacaagaaagccaccagctgttttcagcggtggtacgtggcgagctgaagccggaacaactggcggcggcgctggtgagcatgaaaattcgcggtgaacacccgaacgagatcgccggggcagcaaccgcgctactggaaaacgccgcgccattcccgcgcccggattatctgtttgccgatatcgtcggtactggcggtgacggcagcaacagcatcaatatttctaccgccagtgcgtttgtcgccgcggcctgcgggctgaaagtggcgaaacacggcaaccgtagcgtctccagtaaatccggctcgtcggatctgctggcggcgttcggtattaatcttgatatgaacgccgataaatcgcgccaggcgctggatgagttaggcgtctgtttcctctttgcgccgaagtatcacaccggattccgccatgcgatgccggttcgccagcaactgaaaacccgcactctgttcaacgtgctgggaccattgattaacccggcgcatccgccgctggcgctaattggtgtttatagtccggaactggtgctgccgattgccgaaaccttgcgcgtgctggggtatcaacgcgcggcagtggtgcacagcggcgggatggatgaagtttcattacacgcgccgacaatcgttgccgaactacatgacggcgaaattaagagctatcaattgaccgctgaagattttggcctgacaccctaccaccaggagcaattggcaggcggaacaccggaagaaaaccgtgacattttaacacgcttgttacaaggtaaaggcgacgccgcccatgaagcagccgtcgcggcgaatgtcgccatgttaatgcgcctgcatggccatgaagatctgcaagccaatgcgcaaaccgttcttgaggtactgcgcagtggttccgcttacgacagagtcaccgcactggcggcacgagggtaaatgatgcaaaccgttttagcgaaaatcgtcgcagacaaggcgatttgggtagaaacccgcaaagagcagcaaccgctggccagttttcagaatgaggttcagccgagcacgcgacatttttatgatgcacttcagggcgcacgcacggcgtttattctggagtgtaaaaaagcgtcgccgtcaaaaggcgtgatccgtgatgatttcgatccggcacgcattgccgccatttataaacattacgcttcggcaatttcagtgctgactgatgagaaatattttcaggggagctttgatttcctccccatcgtcagccaaatcgccccgcagccgattttatgtaaagacttcattatcgatccttaccagatctatctggcgcgctattaccaggccgatgcctgcttattaatgctttcagtactggatgacgaacaatatcgccagcttgcagccgtcgcccacagtctggagatgggtgtgctgaccgaagtcagtaatgaagaggaactggagcgcgccattgcattgggggcaaaggtcgttggcatcaacaaccgcgatctgcgcgatttgtcgattgatctcaaccgtacccgcgagcttgcgccgaaactggggcacaacgtgacggtaatcagcgaatccggcatcaatacttacgctcaggtgcgcgagttaagccacttcgctaacggctttctgattggttcggcgttgatggcccatgacgatttgaacgccgccgtgcgtcgggtgttgctgggtgagaataaagtatgtggcctgacacgtgggcaagatgctaaagcagcttatgacgcgggcgcgatttacggtgggttgatttttgttgcgacatcaccgcgttgcgtcaacgttgaacaggcgcaggaagtgatggctgcagcaccgttgcagtatgttggcgtgttccgcaatcacgatattgccgatgtggcggacaaagctaaggtgttatcgctggcggcagtgcaactgcatggtaatgaagatcagctgtatatcgacaatctgcgtgaggctctgccagcacacgtcgccatctggaaggctttaagtgtcggtgaaactcttcccgcgcgcgattttcagcacatcgataaatatgtattcgacaacggtcagggcgggagcggacaacgtttcgactggtcactattaaatggtcaatcgcttggcaacgttctgctggcggggggcttaggcgcagataactgcgtggaagcggcacaaaccggctgcgccgggcttgattttaattctgctgtagagtcgcaaccgggtatcaaagacgcacgtcttttggcctcggttttccagacgctgcgcgcatattaaggaaaggaacaatgacaacattacttaacccctattttggtgagtttggcggcatgtacgtgccacaaatcctgatgcctgctctgcgccagctggaagaagcttttgtcagcgcgcaaaaagatcctgaatttcaggctcagttcaacgacctgctgaaaaactatgccgggcgtccaaccgcgctgaccaaatgccagaacattacagccgggacgaacaccacgctgtatctgaagcgcgaagatttgctgcacggcggcgcgcataaaactaaccaggtgctcggtcaggctttactggcgaagcggatgggtaaaactgaaattattgccgaaaccggtgccggtcagcatggcgtggcgtcggcccttgccagcgccctgctcggcctgaaatgccgaatttatatgggtgccaaagacgttgaacgccagtcgcccaacgttttccggatgcgcttaatgggtgcggaagtgatcccggtacatagcggttccgcgaccctgaaagatgcctgtaatgaggcgctacgcgactggtccggcagttatgaaaccgcgcactatatgctgggtaccgcagctggcccgcatccttacccgaccattgtgcgtgagtttcagcggatgattggcgaagaaacgaaagcgcagattctggaaagagaaggtcgcctgccggatgccgttatcgcctgtgttggcggtggttcgaatgccatcggtatgtttgcagatttcatcaacgaaaccgacgtcggcctgattggtgtggagcctggcggccacggtatcgaaactggcgagcacggcgcaccgttaaaacatggtcgcgtgggcatctatttcggtatgaaagcgccgatgatgcaaaccgaagacgggcaaattgaagagtcttactccatttctgccgggctggatttcccgtccgtcggcccgcaacatgcgtatctcaacagcactggacgcgctgattacgtgtctattaccgacgatgaagccctggaagcctttaaaacgctttgcctgcatgaagggatcatcccggcgctggaatcctcccacgccctggcccatgcgctgaaaatgatgcgcgaaaatccggaaaaagagcagctactggtggttaacctttccggtcgcggcgataaagacatcttcaccgttcacgatattttgaaagcacgaggggaaatctgatggaacgctacgaatctctgtttgcccagttgaaggagcgcaaagaaggcgcattcgttcctttcgtcaccctcggtgatccgggcattgagcagtcgttgaaaattatcgatacgctaattgaagccggtgctgacgcgctggagttaggcatccccttctccgacccactggcggatggcccgacgattcaaaacgccacactgcgtgcttttgcggcgggagtaaccccggcgcagtgctttgagatgctggcactcattcgccagaagcacccgaccattcccatcggccttttgatgtatgccaacctggtgtttaacaaaggcattgatgagttttatgccgagtgcgagaaagtcggcgtcgattcggtgctggttgccgatgtgcccgtggaagagtccgcgcccttccgccaggccgcgttgcgtcataatgtcgcacctatctttatttgcccgccgaatgccgacgatgatttgctgcgccagatagcctcttacggtcgtggttacacctatttgctgtcgcgagcgggcgtgaccggcgcagaaaaccgcgccgcgttacccctcaatcatctggttgcgaagctgaaagagtacaacgctgcgcctccattgcagggatttggtatttccgccccggatcaggtaaaagccgcgattgatgcaggagctgcgggcgcgatttctggttcggccatcgttaaaatcatcgagcaacatattaatgagccagagaaaatgctggcggcactgaaagcttttgtacaaccgatgaaagcggcgacgcgcagttaa

SEQ ID NO: 274 - DNA, 1562 bp, Artificial Sequence
  Synthetic
atgcaaacacaaaaaccgactctcgaactgctaacctgcgaaggcgcttatcgcgacaacccgactgcgctttttcaccagttgtgtggggatcgtccggcaacgctgctgctggaattcgcagatatcgacagcaaagatgatttaaaaagcctgctgctggtagacagtgcgctgcgcattacagcattaagtgacactgtcacaatccaggcgctttccggcaatggagaagccctgttgacactactggataacgccttgcctgcgggtgtggaaaatgaacaatcaccaaactgccgcgtactgcgcttcccgcctgtcagtccactgctggatgaagacgcccgcttatgctccctttcggtttttgacgctttccgcttattacagaatctgttgaatgtaccgaaggaagaacgagaagcaatgttcttcggcggcctgttctcttatgaccttgtggcgggatttgaaaatttaccgcaactgtcagcggaaaatagctgccctgatttctgtttttatctcgctgaaacgctgatggtgattgaccatcagaaaaaaagcactcgtattcaggccagcctgtttgctccgaatgaagaagaaaaacaacgtctcactgctcgcctgaacgaactacgtcagcaactgaccgaagccgcgccgccgctgccggtggtttccgtgccgcatatgcgttgtgaatgtaaccagagcgatgaagagttcggtggtgtagtgcgtttgttgcaaaaagcgattcgcgccggagaaattttccaggtggtgccatctcgccgtttctctctgccctgcccgtcaccgctggcagcctattacgtgctgaaaaagagtaatcccagcccgtacatgttttttatgcaggataatgatttcaccctgtttggcgcgtcgccggaaagttcgctcaagtatgacgccaccagccgccagattgagatttacccgattgccggaacacgtccacgcggtcgtcgtgccgatggttcgctggacagagacctcgacagccgcatcgaactggagatgcgtaccgatcataaagagctttctgaacatctgatgctggtggatctcgcccgtaatgacctggcacgcatttgcacacccggcagccgctacgtcgccgatctcaccaaagttgaccgttactcttacgtgatgcacctagtctcccgcgttgttggtgagctgcgccacgatctcgacgccctgcacgcttaccgcgcctgtatgaatatggggacgttaagcggtgcaccgaaagtacgcgctatgcagttaattgccgaagcagaaggtcgtcgacgcggcagctacggcggcgcggtaggttattttaccgcgcatggcgatctcgacacctgcattgtgatccgctcggcgctggtggaaaacggtatcgccaccgtgcaagccggtgctggcgtagtccttgattctgttccgcagtcggaagccgacgaaactcgtaataaagcccgcgctgtactgcgcgctattgccaccgcgcatcatgcacaggagacgttcta

SEQ ID NO: 275 - DNA, 7615 bp, Artificial Sequence
  Synthetic
ctctagaaataattttgtttaactttaagaaggagatatacatatgaattatcagaacgacgatttacgcatcaaagaaatcaaagagttacttcctcctgtcgcattgctggaaaaattccccgctactgaaaatgccgcgaatacggtcgcccatgcccgaaaagcgatccataagatcctgaaaggtaatgatgatcgcctgttggtggtgattggcccatgctcaattcatgatcctgtcgcggctaaagagtatgccactcgcttgctgacgctgcgtgaagagctgcaagatgagctggaaatcgtgatgcgcgtctattttgaaaagccgcgtactacggtgggctggaaagggctgattaacgatccgcatatggataacagcttccagatcaacgacggtctgcgtattgcccgcaaattgctgctcgatattaacgacagcggtctgccagcggcgggtgaattcctggatatgatcaccctacaatatctcgctgacctgatgagctggggcgcaattggcgcacgtaccaccgaatcgcaggtgcaccgcgaactggcgtctggtctttcttgtccggtaggtttcaaaaatggcactgatggtacgattaaagtggctatcgatgccattaatgccgccggtgcgccgcactgcttcctgtccgtaacgaaatgggggcattcggcgattgtgaataccagcggtaacggcgattgccatatcattctgcgcggcggtaaagagcctaactacagcgcgaagcacgttgctgaagtgaaagaagggctgaacaaagcaggcctgccagcgcaggtgatgatcgatttcagccatgctaactcgtcaaaacaattcaaaaagcagatggatgtttgtactgacgtttgccagcagattgccggtggcgaaaaggccattattggcgtgatggtggaaagccatctggtggaaggcaatcagagcctcgagagcggggaaccgctggcctacggtaagagcatcaccgatgcctgcattggctgggatgataccgatgctctgttacgtcaactggcgagtgcagtaaaagcgcgtcgcgggtaatacttaagaaggagatatacatatgctgttattcgagactgtgcgtgaaatgggtcatgagcaagtccttttctgtcatagcaagaatcccgagatcaaggcaattatcgcaatccacgataccaccttaggaccggctatgggcgcaactcgtatcttaccttatattaatgaggaggctgccctgaaagatgcattacgtctgtcccgcggaatgacttacaaagcagcctgcgccaatattcccgccgggggcggcaaagccgtcatcatcgctaaccccgaaaacaagaccgatgacctgttacgcgcatacggccgtttcgtggacagcttgaacggccgtttcatcaccgggcaggacgttaacattacgcccgacgacgttcgcactatttcgcaggagactaagtacgtggtaggcgtctcagaaaagtcgggagggccggcacctatcacctctctgggagtatttttaggcatcaaagccgctgtagagtcgcgttggcagtctaaacgcctggatggcatgaaagtggcggtgcaaggacttgggaacgtaggaaaaaatctttgtcgccatctgcatgaacacgatgtacaactttttgtgtctgatgtcgatccaatcaaggccgaggaagtaaaacgcttattcggggcgactgttgtcgaaccgactgaaatctattctttagatgttgatatttttgcaccgtgtgcacttgggggtattttgaatagccataccatcccgttcttacaagcctcaatcatcgcaggagcagcgaataaccagctggagaacgagcaacttcattcgcagatgcttgcgaaaaagggtattctttactcaccagactacgttatcaatgcaggaggacttatcaatgtttataacgaaatgatcggatatgacgaggaaaaagcattcaaacaagttcataacatctacgatacgttattagcgattttcgaaattgcaaaagaacaaggtgtaaccaccaacgacgcggcccgtcgtttagcagaggatcgtatcaacaactccaaacgctcaaagagtaaagcgattgcggcgtgaaatgtaagaaggagatatacatatggaaaacaacaccaatatgttctctggagtgaaggtgatcgaactggccaactttatcgctgctccggcggcaggtcgcttctttgctgatgggggagcagaagtaattaagatcgaatctccagcaggcgacccgctgcgctacacggccccatcagaaggacgcccgctttctcaagaggaaaacacaacgtatgatttggaaaacgcgaataagaaagcaattgttctgaacttaaaatcggaaaaaggaaagaaaattcttcacgagatgcttgctgaggcagacatcttgttaacaaattggcgcacgaaagcgttagtcaaacaggggttagattacgaaacactgaaagagaagtatccaaaattggtatttgcacagattacaggatacggggagaaaggacccgacaaagacctgcctggtttcgactacacggcgtttttcgcccgcggaggagtctccggtacattatatgaaaaaggaactgtccctcctaatgtggtaccgggtctgggtgaccaccaggcaggaatgttcttagctgccggtatggctggtgcgttgtataaggccaaaaccaccggacaaggcgacaaagtcaccgttagtctgatgcatagcgcaatgtacggcctgggaatcatgattcaggcagcccagtacaaggaccatgggctggtgtacccgatcaaccgtaatgaaacgcctaatcctttcatcgtttcatacaagtccaaagatgattactttgtccaagtttgcatgcctccctatgatgtgttttatgatcgctttatgacggccttaggacgtgaagacttggtaggtgacgaacgctacaataagatcgagaacttgaaggatggtcgcgcaaaagaagtctattccatcatcgaacaacaaatggtaacgaagacgaaggacgaatgggacaagatttttcgtgatgcagacattccattcgctattgcccaaacgtgggaagatcttttagaagacgagcaggcatgggccaacgactacctgtataaaatgaagtatcccacaggcaacgaacgtgccctggtacgtttacctgtgttcttcaaagaagctggacttcctgaatacaaccagtcgccacagattgctgagaataccgtggaagtgttaaaggagatgggatataccgagcaagaaattgaggagcttgagaaagacaaagacatcatggtacgtaaagagaaatgaaggttaagaaggagatatacatatgtcagaccgcaacaaagaagtgaaagaaaagaaggctaaacactatctgcgcgagatcacagctaaacactacaaggaagcgttagaggctaaagagcgtggggagaaagtgggttggtgtgcctctaacttcccccaagagattgcaaccacgttgggtgtaaaggttgtttatcccgaaaaccacgccgccgccgtagcggcacgtggcaatgggcaaaatatgtgcgaacacgcggaggctatgggattcagtaatgatgtgtgtggatatgcacgtgtaaatttagccgtaatggacatcggccatagtgaagatcaacctattccaatgcctgatttcgttctgtgctgtaataatatctgcaatcagatgattaaatggtatgaacacattgcaaaaacgttggatattcctatgatccttatcgatattccatataatactgagaacacggtgtctcaggaccgcattaagtacatccgcgcccagttcgatgacgctatcaagcaactggaagaaatcactggcaaaaagtgggacgagaataaattcgaagaagtgatgaagatttcgcaagaatcggccaagcaatggttacgcgccgcgagctacgcgaaatacaaaccatcaccgttttcgggctttgacctttttaatcacatggctgtagccgtttgtgctcgcggcacccaggaagccgccgatgcattcaaaatgttagcagatgaatatgaagagaacgttaagacaggaaagtctacttatcgcggcgaggagaagcagcgtatcttgttcgagggcatcgcttgttggccttatctgcgccacaagttgacgaaactgagtgaatatggaatgaacgtcacagctacggtgtacgccgaagcttttggggttatttacgaaaacatggatgaactgatggccgcttacaataaagtgcctaactcaatctccttcgagaacgcgctgaagatgcgtcttaatgccgttacaagcaccaatacagaaggggctgttatccacattaatcgcagttgtaagctgtggtcaggattcttatacgaactggcccgtcgtttggaaaaggagacggggatccctgttgtttcgttcgacggagatcaagcggatccccgtaacttctccgaggctcaatatgacactcgcatccaaggtttaaatgaggtgatggtcgcgaaaaaagaagcagagtgagctttaagaaggagatatacatatgtcgaatagtgacaagttttttaacgacttcaaggacattgtggaaaacccaaagaagtatatcatgaagcatatggaacaaacgggacaaaaagccatcggttgcatgcctttatacaccccagaagagcttgtcttagcggcgggtatgtttcctgttggagtatggggctcgaatactgagttgtcaaaagccaagacctactttccggcttttatctgttctatcttgcaaactactttagaaaacgcattgaatggggagtatgacatgctgtctggtatgatgatcacaaactattgcgattcgctgaaatgtatgggacaaaacttcaaacttacagtggaaaatatcgaattcatcccggttacggttccacaaaaccgcaagatggaggcgggtaaagaatttctgaaatcccagtataaaatgaatatcgaacaactggaaaaaatctcagggaataagatcactgacgagagcttggagaaggctattgaaatttacgatgagcaccgtaaagtcatgaacgatttctctatgcttgcgtccaagtaccctggtatcattacgccaacgaaacgtaactacgtgatgaagtcagcgtattatatggacaagaaagaacatacagagaaggtacgtcagttgatggatgaaatcaaggccattgagcctaaaccattcgaaggaaaacgcgtgattaccactgggatcattgcagattcggaggaccttttgaaaatcttggaggagaataacattgctatcgtgggagatgatattgcacacgagtctcgccaataccgcactttgaccccggaggccaacacacctatggaccgtcttgctgaacaatttgcgaaccgcgagtgttcgacgttgtatgaccctgaaaaaaaacgtggacagtatattgtcgagatggcaaaagagcgtaaggccgacggaatcatcttcttcatgacaaaattctgcgatcccgaagaatacgattaccctcagatgaaaaaagacttcgaagaagccggtattccccacgttctgattgagacagacatgcaaatgaagaactacgaacaagctcgcaccgctattcaagcattttcagaaaccctttgacgcttaagaaggagatatacatatgcgtgctgtcttaatcgagaagtcagatgacacccagagtgtttcagttacggagttggctgaagaccaattacccgaaggtgacgtccttgtggatgtcgcgtacagcacattgaattacaaggatgctcttgcgattactggaaaagcacccgttgtacgccgttttcctatggtccccggaattgactttactgggactgtcgcacagagttcccatgctgatttcaagccaggcgaccgcgtaattctgaacggatggggagttggtgagaaacactggggcggtcttgcagaacgcgcacgcgtacgtggggactggcttgtcccgttgccagcccccttagacttgcgccaggctgcaatgattggcactgcggggtacacagctatgctgtgcgtgcttgcccttgagcgccatggagtcgtacctgggaacggcgagattgtcgtctcaggcgcagcaggaggggtaggttctgtagcaaccacactgttagcagccaaaggctacgaagtggccgccgtgaccgggcgcgcaagcgaggccgaatatttacgcggattaggcgccgcgtcggtcattgatcgcaatgaattaacggggaaggtgcgtccattagggcaggaacgctgggcaggaggaatcgatgtagcaggatcaaccgtacttgctaatatgttgagcatgatgaaataccgtggcgtggtggcggcctgtggcctggcggctggaatggacttgcccgcgtctgtcgccccttttattctgcgtggtatgactttggcaggggtagattcagtcatgtgccccaaaactgatcgtctggctgcttgggcacgcctggcatccgacctggaccctgcaaagctggaagagatgacaactgaattaccgttctctgaggtgattgaaacggctccgaagttcttggatggaacagtgcgtgggcgtattgtcattccggtaacaccttgatacttaagaaggagatatacatatgaaaatcttggcatactgcgtccgcccagacgaggtagactcctttaagaaatttagtgaaaagtacgggcatacagttgatcttattccagactcttttggacctaatgtcgctcatttggcgaagggttacgatgggatttctattctgggcaacgacacgtgtaaccgtgaggcactggagaagatcaaggattgcgggatcaaatatctggcaacccgtacagccggagtgaacaacattgacttcgatgcagcaaaggagttcggtattaacgtggctaatgttcccgcatattcccccaactcggtcagcgaatttaccattggattggcattaagtctgacgcgtaagattccatttgccctgaaacgcgtggaactgaacaattttgcgcttggcggccttattggtgtggaattgcgtaacttaactttaggagtcatcggtactggtcgcatcggattgaaagtgattgagggcttctctgggtttggaatgaaaaaaatgatcggttatgacatttttgaaaatgaagaagcaaagaagtacatcgaatacaaatcattagacgaagtttttaaagaggctgatattatcactctgcatgcgcctctgacagacgacaactatcatatgattggtaaagaatccattgctaaaatgaaggatggggtatttattatcaacgcagcgcgtggagccttaatcgatagtgaggccctgattgaagggttaaaatcggggaagatt

SEQ ID NO: 276 - DNA, 1239 bp, Artificial Sequence
  Synthetic
atggaaaacaacaccaatatgttctctggagtgaaggtgatcgaactggccaactttatcgctgctccggcggcaggtcgcttctttgctgatgggggagcagaagtaattaagatcgaatctccagcaggcgacccgctgcgctacacggccccatcagaaggacgcccgctttctcaagaggaaaacacaacgtatgatttggaaaacgcgaataagaaagcaattgttctgaacttaaaatcggaaaaaggaaagaaaattcttcacgagatgcttgctgaggcagacatcttgttaacaaattggcgcacgaaagcgttagtcaaacaggggttagattacgaaacactgaaagagaagtatccaaaattggtatttgcacagattacaggatacggggagaaaggacccgacaaagacctgcctggtttcgactacacggcgtttttcgcccgcggaggagtctccggtacattatatgaaaaaggaactgtccctcctaatgtggtaccgggtctgggtgaccaccaggcaggaatgttcttagctgccggtatggctggtgcgttgtataaggccaaaaccaccggacaaggcgacaaagtcaccgttagtctgatgcatagcgcaatgtacggcctgggaatcatgattcaggcagcccagtacaaggaccatgggctggtgtacccgatcaaccgtaatgaaacgcctaatcctttcatcgtttcatacaagtccaaagatgattactttgtccaagtttgcatgcctccctatgatgtgttttatgatcgctttatgacggccttaggacgtgaagacttggtaggtgacgaacgctacaataagatcgagaacttgaaggatggtcgcgcaaaagaagtctattccatcatcgaacaacaaatggtaacgaagacgaaggacgaatgggacaagatttttcgtgatgcagacattccattcgctattgcccaaacgtgggaagatcttttagaagacgagcaggcatgggccaacgactacctgtataaaatgaagtatcccacaggcaacgaacgtgccctggtacgtttacctgtgttcttcaaagaagctggacttcctgaatacaaccagtcgccacagattgctgagaataccgtggaagtgttaaaggagatgggatataccgagcaagaaattgaggagcttgagaaagacaaagacatcatggtacgtaaagagaaatga

SEQ ID NO: 277 - DNA, 1224 bp, Artificial Sequence
  Synthetic
atgtcagaccgcaacaaagaagtgaaagaaaagaaggctaaacactatctgcgcgagatcacagctaaacactacaaggaagcgttagaggctaaagagcgtggggagaaagtgggttggtgtgcctctaacttcccccaagagattgcaaccacgttgggtgtaaaggttgtttatcccgaaaaccacgccgccgccgtagcggcacgtggcaatgggcaaaatatgtgcgaacacgcggaggctatgggattcagtaatgatgtgtgtggatatgcacgtgtaaatttagccgtaatggacatcggccatagtgaagatcaacctattccaatgcctgatttcgttctgtgctgtaataatatctgcaatcagatgattaaatggtatgaacacattgcaaaaacgttggatattcctatgatccttatcgatattccatataatactgagaacacggtgtctcaggaccgcattaagtacatccgcgcccagttcgatgacgctatcaagcaactggaagaaatcactggcaaaaagtgggacgagaataaattcgaagaagtgatgaagatttcgcaagaatcggccaagcaatggttacgcgccgcgagctacgcgaaatacaaaccatcaccgttttcgggctttgacctttttaatcacatggctgtagccgtttgtgctcgcggcacccaggaagccgccgatgcattcaaaatgttagcagatgaatatgaagagaacgttaagacaggaaagtctacttatcgcggcgaggagaagcagcgtatcttgttcgagggcatcgcttgttggccttatctgcgccacaagttgacgaaactgagtgaatatggaatgaacgtcacagctacggtgtacgccgaagcttttggggttatttacgaaaacatggatgaactgatggccgcttacaataaagtgcctaactcaatctccttcgagaacgcgctgaagatgcgtcttaatgccgttacaagcaccaatacagaaggggctgttatccacattaatcgcagttgtaagctgtggtcaggattcttatacgaactggcccgtcgtttggaaaaggagacggggatccctgttgtttcgttcgacggagatcaagcggatccccgtaacttctccgaggctcaatatgacactcgcatccaaggtttaaatgaggtgatggtcgcgaaaaaagaagcagagtga

SEQ ID NO: 278 - DNA, 1124 bp, Artificial Sequence
  Synthetic
atgtcgaatagtgacaagttttttaacgacttcaaggacattgtggaaaacccaaagaagtatatcatgaagcatatggaacaaacgggacaaaaagccatcggttgcatgcctttatacaccccagaagagcttgtcttagcggcgggtatgtttcctgttggagtatggggctcgaatactgagttgtcaaaagccaagacctactttccggcttttatctgttctatcttgcaaactactttagaaaacgcattgaatggggagtatgacatgctgtctggtatgatgatcacaaactattgcgattcgctgaaatgtatgggacaaaacttcaaacttacagtggaaaatatcgaattcatcccggttacggttccacaaaaccgcaagatggaggcgggtaaagaatttctgaaatcccagtataaaatgaatatcgaacaactggaaaaaatctcagggaataagatcactgacgagagcttggagaaggctattgaaatttacgatgagcaccgtaaagtcatgaacgatttctctatgcttgcgtccaagtaccctggtatcattacgccaacgaaacgtaactacgtgatgaagtcagcgtattatatggacaagaaagaacatacagagaaggtacgtcagttgatggatgaaatcaaggccattgagcctaaaccattcgaaggaaaacgcgtgattaccactgggatcattgcagattcggaggaccttttgaaaatcttggaggagaataacattgctatcgtgggagatgatattgcacacgagtctcgccaataccgcactttgaccccggaggccaacacacctatggaccgtcttgctgaacaatttgcgaaccgcgagtgttcgacgttgtatgaccctgaaaaaaaacgtggacagtatattgtcgagatggcaaaagagcgtaaggccgacggaatcatcttcttcatgacaaaattctgcgatcccgaagaatacgattaccctcagatgaaaaaagacttcgaagaagccggtattccccacgttctgattgagacagacatgcaaatgaagaactacgaacaagctcgcaccgctattcaagcattttcagaaaccctttg

SEQ ID NO: 279 - DNA, 981 bp, Artificial Sequence
  Synthetic
atgcgtgctgtcttaatcgagaagtcagatgacacccagagtgtttcagttacggagttggctgaagaccaattacccgaaggtgacgtccttgtggatgtcgcgtacagcacattgaattacaaggatgctcttgcgattactggaaaagcacccgttgtacgccgttttcctatggtccccggaattgactttactgggactgtcgcacagagttcccatgctgatttcaagccaggcgaccgcgtaattctgaacggatggggagttggtgagaaacactggggcggtcttgcagaacgcgcacgcgtacgtggggactggcttgtcccgttgccagcccccttagacttgcgccaggctgcaatgattggcactgcggggtacacagctatgctgtgcgtgcttgcccttgagcgccatggagtcgtacctgggaacggcgagattgtcgtctcaggcgcagcaggaggggtaggttctgtagcaaccacactgttagcagccaaaggctacgaagtggccgccgtgaccgggcgcgcaagcgaggccgaatatttacgcggattaggcgccgcgtcggtcattgatcgcaatgaattaacggggaaggtgcgtccattagggcaggaacgctgggcaggaggaatcgatgtagcaggatcaaccgtacttgctaatatgttgagcatgatgaaataccgtggcgtggtggcggcctgtggcctggcggctggaatggacttgcccgcgtctgtcgccccttttattctgcgtggtatgactttggcaggggtagattcagtcatgtgccccaaaactgatcgtctggctgcttgggcacgcctggcatccgacctggaccctgcaaagctggaagagatgacaactgaattaccgttctctgaggtgattgaaacggctccgaagttcttggatggaacagtgcgtgggcgtattgtcattccggtaacaccttga

SEQ ID NO: 280 - DNA, 996 bp, Artificial Sequence
  Synthetic
atgaaaatcttggcatactgcgtccgcccagacgaggtagactcctttaagaaatttagtgaaaagtacgggcatacagttgatcttattccagactcttttggacctaatgtcgctcatttggcgaagggttacgatgggatttctattctgggcaacgacacgtgtaaccgtgaggcactggagaagatcaaggattgcgggatcaaatatctggcaacccgtacagccggagtgaacaacattgacttcgatgcagcaaaggagttcggtattaacgtggctaatgttcccgcatattcccccaactcggtcagcgaatttaccattggattggcattaagtctgacgcgtaagattccatttgccctgaaacgcgtggaactgaacaattttgcgcttggcggccttattggtgtggaattgcgtaacttaactttaggagtcatcggtactggtcgcatcggattgaaagtgattgagggcttctctgggtttggaatgaaaaaaatgatcggttatgacatttttgaaaatgaagaagcaaagaagtacatcgaatacaaatcattagacgaagtttttaaagaggctgatattatcactctgcatgcgcctctgacagacgacaactatcatatgattggtaaagaatccattgctaaaatgaaggatggggtatttattatcaacgcagcgcgtggagccttaatcgatagtgaggccctgattgaagggttaaaatcggggaagattgcgggcgcggctctggatagctatgagtatgagcaaggtgtctttcacaacaataagatgaatgaaattatgcaggatgataccttggaacgtctgaaatcttttcccaacgtcgtgatcacgccgcatttgggtttttatactgatgaggcggtttccaatatggtagagatcacactgatgaaccttcaggaattcgagttgaaaggaacctgtaagaaccagcgtgtttgtaaatga

SEQ ID NO: 281 - DNA, 8008 bp, Artificial Sequence
  Synthetic
ctctagaaataattttgtttaactttaagaaggagatatacatatgaattatcagaacgacgatttacgcatcaaagaaatcaaagagttacttcctcctgtcgcattgctggaaaaattccccgctactgaaaatgccgcgaatacggtcgcccatgcccgaaaagcgatccataagatcctgaaaggtaatgatgatcgcctgttggtggtgattggcccatgctcaattcatgatcctgtcgcggctaaagagtatgccactcgcttgctgacgctgcgtgaagagctgcaagatgagctggaaatcgtgatgcgcgtctattttgaaaagccgcgtactacggtgggctggaaagggctgattaacgatccgcatatggataacagcttccagatcaacgacggtctgcgtattgcccgcaaattgctgctcgatattaacgacagcggtctgccagcggcgggtgaattcctggatatgatcaccctacaatatctcgctgacctgatgagctggggcgcaattggcgcacgtaccaccgaatcgcaggtgcaccgcgaactggcgtctggtctttcttgtccggtaggtttcaaaaatggcactgatggtacgattaaagtggctatcgatgccattaatgccgccggtgcgccgcactgcttcctgtccgtaacgaaatgggggcattcggcgattgtgaataccagcggtaacggcgattgccatatcattctgcgcggcggtaaagagcctaactacagcgcgaagcacgttgctgaagtgaaagaagggctgaacaaagcaggcctgccagcgcaggtgatgatcgatttcagccatgctaactcgtcaaaacaattcaaaaagcagatggatgtttgtactgacgtttgccagcagattgccggtggcgaaaaggccattattggcgtgatggtggaaagccatctggtggaaggcaatcagagcctcgagagcggggaaccgctggcctacggtaagagcatcaccgatgcctgcattggctgggatgataccgatgctctgttacgtcaactggcgagtgcagtaaaagcgcgtcgcgggtaatacttaagaaggagatatacatatgctgttattcgagactgtgcgtgaaatgggtcatgagcaagtccttttctgtcatagcaagaatcccgagatcaaggcaattatcgcaatccacgataccaccttaggaccggctatgggcgcaactcgtatcttaccttatattaatgaggaggctgccctgaaagatgcattacgtctgtcccgcggaatgacttacaaagcagcctgcgccaatattcccgccgggggcggcaaagccgtcatcatcgctaaccccgaaaacaagaccgatgacctgttacgcgcatacggccgtttcgtggacagcttgaacggccgtttcatcaccgggcaggacgttaacattacgcccgacgacgttcgcactatttcgcaggagactaagtacgtggtaggcgtctcagaaaagtcgggagggccggcacctatcacctctctgggagtatttttaggcatcaaagccgctgtagagtcgcgttggcagtctaaacgcctggatggcatgaaagtggcggtgcaaggacttgggaacgtaggaaaaaatctttgtcgccatctgcatgaacacgatgtacaactttttgtgtctgatgtcgatccaatcaaggccgaggaagtaaaacgcttattcggggcgactgttgtcgaaccgactgaaatctattctttagatgttgatatttttgcaccgtgtgcacttgggggtattttgaatagccataccatcccgttcttacaagcctcaatcatcgcaggagcagcgaataaccagctggagaacgagcaacttcattcgcagatgcttgcgaaaaagggtattctttactcaccagactacgttatcaatgcaggaggacttatcaatgtttataacgaaatgatcggatatgacgaggaaaaagcattcaaacaagttcataacatctacgatacgttattagcgattttcgaaattgcaaaagaacaaggtgtaaccaccaacgacgcggcccgtcgtttagcagaggatcgtatcaacaactccaaacgctcaaagagtaaagcgattgcggcgtgaaatgtaagaaggagatatacatatggaaaacaacaccaatatgttctctggagtgaaggtgatcgaactggccaactttatcgctgctccggcggcaggtcgcttctttgctgatgggggagcagaagtaattaagatcgaatctccagcaggcgacccgctgcgctacacggccccatcagaaggacgcccgctttctcaagaggaaaacacaacgtatgatttggaaaacgcgaataagaaagcaattgttctgaacttaaaatcggaaaaaggaaagaaaattcttcacgagatgcttgctgaggcagacatcttgttaacaaattggcgcacgaaagcgttagtcaaacaggggttagattacgaaacactgaaagagaagtatccaaaattggtatttgcacagattacaggatacggggagaaaggacccgacaaagacctgcctggtttcgactacacggcgtttttcgcccgcggaggagtctccggtacattatatgaaaaaggaactgtccctcctaatgtggtaccgggtctgggtgaccaccaggcaggaatgttcttagctgccggtatggctggtgcgttgtataaggccaaaaccaccggacaaggcgacaaagtcaccgttagtctgatgcatagcgcaatgtacggcctgggaatcatgattcaggcagcccagtacaaggaccatgggctggtgtacccgatcaaccgtaatgaaacgcctaatcctttcatcgtttcatacaagtccaaagatgattactttgtccaagtttgcatgcctccctatgatgtgttttatgatcgctttatgacggccttaggacgtgaagacttggtaggtgacgaacgctacaataagatcgagaacttgaaggatggtcgcgcaaaagaagtctattccatcatcgaacaacaaatggtaacgaagacgaaggacgaatgggacaagatttttcgtgatgcagacattccattcgctattgcccaaacgtgggaagatcttttagaagacgagcaggcatgggccaacgactacctgtataaaatgaagtatcccacaggcaacgaacgtgccctggtacgtttacctgtgttcttcaaagaagctggacttcctgaatacaaccagtcgccacagattgctgagaataccgtggaagtgttaaaggagatgggatataccgagcaagaaattgaggagcttgagaaagacaaagacatcatggtacgtaaagagaaatgaaggttaagaaggagatatacatatgtcagaccgcaacaaagaagtgaaagaaaagaaggctaaacactatctgcgcgagatcacagctaaacactacaaggaagcgttagaggctaaagagcgtggggagaaagtgggttggtgtgcctctaacttcccccaagagattgcaaccacgttgggtgtaaaggttgtttatcccgaaaaccacgccgccgccgtagcggcacgtggcaatgggcaaaatatgtgcgaacacgcggaggctatgggattcagtaatgatgtgtgtggatatgcacgtgtaaatttagccgtaatggacatcggccatagtgaagatcaacctattccaatgcctgatttcgttctgtgctgtaataatatctgcaatcagatgattaaatggtatgaacacattgcaaaaacgttggatattcctatgatccttatcgatattccatataatactgagaacacggtgtctcaggaccgcattaagtacatccgcgcccagttcgatgacgctatcaagcaactggaagaaatcactggcaaaaagtgggacgagaataaattcgaagaagtgatgaagatttcgcaagaatcggccaagcaatggttacgcgccgcgagctacgcgaaatacaaaccatcaccgttttcgggctttgacctttttaatcacatggctgtagccgtttgtgctcgcggcacccaggaagccgccgatgcattcaaaatgttagcagatgaatatgaagagaacgttaagacaggaaagtctacttatcgcggcgaggagaagcagcgtatcttgttcgagggcatcgcttgttggccttatctgcgccacaagttgacgaaactgagtgaatatggaatgaacgtcacagctacggtgtacgccgaagcttttggggttatttacgaaaacatggatgaactgatggccgcttacaataaagtgcctaactcaatctccttcgagaacgcgctgaagatgcgtcttaatgccgttacaagcaccaatacagaaggggctgttatccacattaatcgcagttgtaagctgtggtcaggattcttatacgaactggcccgtcgtttggaaaaggagacggggatccctgttgtttcgttcgacggagatcaagcggatccccgtaacttctccgaggctcaatatgacactcgcatccaaggtttaaatgaggtgatggtcgcgaaaaaagaagcagagtgagctttaagaaggagatatacatatgtcgaatagtgacaagttttttaacgacttcaaggacattgtggaaaacccaaagaagtatatcatgaagcatatggaacaaacgggacaaaaagccatcggttgcatgcctttatacaccccagaagagcttgtcttagcggcgggtatgtttcctgttggagtatggggctcgaatactgagttgtcaaaagccaagacctactttccggcttttatctgttctatcttgcaaactactttagaaaacgcattgaatggggagtatgacatgctgtctggtatgatgatcacaaactattgcgattcgctgaaatgtatgggacaaaacttcaaacttacagtggaaaatatcgaattcatcccggttacggttccacaaaaccgcaagatggaggcgggtaaagaatttctgaaatcccagtataaaatgaatatcgaacaactggaaaaaatctcagggaataagatcactgacgagagcttggagaaggctattgaaatttacgatgagcaccgtaaagtcatgaacgatttctctatgcttgcgtccaagtaccctggtatcattacgccaacgaaacgtaactacgtgatgaagtcagcgtattatatggacaagaaagaacatacagagaaggtacgtcagttgatggatgaaatcaaggccattgagcctaaaccattcgaaggaaaacgcgtgattaccactgggatcattgcagattcggaggaccttttgaaaatcttggaggagaataacattgctatcgtgggagatgatattgcacacgagtctcgccaataccgcactttgaccccggaggccaacacacctatggaccgtcttgctgaacaatttgcgaaccgcgagtgttcgacgttgtatgaccctgaaaaaaaacgtggacagtatattgtcgagatggcaaaagagcgtaaggccgacggaatcatcttcttcatgacaaaattctgcgatcccgaagaatacgattaccctcagatgaaaaaagacttcgaagaagccggtattccccacgttctgattgagacagacatgcaaatgaagaactacgaacaagctcgcaccgctattcaagcattttcagaaaccctttgacgcttaagaaggagatatacatatgttctttacggagcaacacgaacttattcgcaaactggcgcgtgactttgccgaacaggaaatcgagcctatcgcagacgaagtagataaaaccgcagagttcccaaaagaaatcgtgaagaagatggctcaaaatggatttttcggcattaaaatgcctaaagaatacggaggggcgggtgcggataaccgcgcttatgtcactattatggaggaaatttcacgtgcttccggggtagcgggtatctacctgagctcgccgaacagtttgttaggaactcccttcttattggtcggaaccgatgagcaaaaagaaaagtaccttaagcctatgatccgcggcgagaagactctggcgttcgccctgacagagcctggtgctggctctgatgcgggtgcgttggctactactgcccgtgaagagggcgactattatatcttaaatggccgcaagacgtttattacaggggctcctattagcgacaatattattgtgttcgcaaaaaccgatatgagcaaagggaccaaaggtatcaccactttcattgtggactcaaagcaggaaggggtaagttttggtaagccagaggacaaaatgggaatgattggttgtccgacaagcgacatcatcttggaaaacgttaaagttcataagtccgacatcttgggagaagtcaataaggggtttattaccgcgatgaaaacactttccgttggtcgtatcggagtggcgtcacaggcgcttggaattgcacaggccgccgtagatgaggcggtaaagtacgccaagcaacgtaaacaattcaatcgcccaatcgcgaaatttcaggccattcaatttaaacttgccaatatggagactaaattaaatgccgctaaacttcttgtttataacgcagcgtacaaaatggattgtggagaaaaagccgacaaggaagcctctatggctaaatactttgctgctgaatcagcgatccaaatcgttaacgacgcgctgcaaatccatggcgggtatggctatatcaaagactacaagattgaacgtttgtaccgcgatgtgcgtgtgatcgctatttatgagggcacttccgaggtccaacagatggttatcgcgtccaatctgctgaagtaatacttaagaaggagatatacatatgaaaatcttggcatactgcgtccgcccagacgaggtagactcctttaagaaatttagtgaaaagtacgggcatacagttgatcttattccagactcttttggacctaatgtcgctcatttggcgaagggttacgatgggatttctattctgggcaacgacacgtgtaaccgtgaggcactggagaagatcaaggattgcgggatcaaatatctggcaacccgtacagccggagtgaacaacattgacttcgatgcagcaaaggagttcggtattaacgtggctaatgttcccgcatattcccccaactcggtcagcgaatttaccattggattggcattaagtctgacgcgtaagattccatttgccctgaaacgcgtggaactgaacaattttgcgcttggcggccttattggtgtggaattgcgtaacttaactttaggagtcatcggtactggtcgcatcggattgaaagtgattgagggcttctctgggtttggaatgaaaaaaatgatcggttatgacatttttgaaaatgaagaagcaaagaagtacatcgaatacaaatcattagacgaagtttttaaagaggctgatattatcactctgcatgcgcctctgacagacgacaactatcatatgattggtaaagaatccattgctaaaatgaaggatggggtatttattatcaacgcagcgcgtggagccttaatcgatagtgaggccctgattgaagggttaaaatcggggaagattgcgggcgcggctctggatagctatgagtatgagcaaggtgtctttcacaacaataagatgaatgaaattatgcaggatgataccttggaacgtctgaaatcttttcccaacgtcgtgatcacgccgcatttgggtttttatactgatgaggcggtttccaatatggtagagatcacactgatgaaccttcaggaattcgagttgaaaggaacctgtaagaaccagcgtgtttgtaaatga

SEQ ID NO: 282 - DNA, 1134 bp, Artificial Sequence
  Synthetic
atgttctttacggagcaacacgaacttattcgcaaactggcgcgtgactttgccgaacaggaaatcgagcctatcgcagacgaagtagataaaaccgcagagttcccaaaagaaatcgtgaagaagatggctcaaaatggatttttcggcattaaaatgcctaaagaatacggaggggcgggtgcggataaccgcgcttatgtcactattatggaggaaatttcacgtgcttccggggtagcgggtatctacctgagctcgccgaacagtttgttaggaactcccttcttattggtcggaaccgatgagcaaaaagaaaagtaccttaagcctatgatccgcggcgagaagactctggcgttcgccctgacagagcctggtgctggctctgatgcgggtgcgttggctactactgcccgtgaagagggcgactattatatcttaaatggccgcaagacgtttattacaggggctcctattagcgacaatattattgtgttcgcaaaaaccgatatgagcaaagggaccaaaggtatcaccactttcattgtggactcaaagcaggaaggggtaagttttggtaagccagaggacaaaatgggaatgattggttgtccgacaagcgacatcatcttggaaaacgttaaagttcataagtccgacatcttgggagaagtcaataaggggtttattaccgcgatgaaaacactttccgttggtcgtatcggagtggcgtcacaggcgcttggaattgcacaggccgccgtagatgaggcggtaaagtacgccaagcaacgtaaacaattcaatcgcccaatcgcgaaatttcaggccattcaatttaaacttgccaatatggagactaaattaaatgccgctaaacttcttgtttataacgcagcgtacaaaatggattgtggagaaaaagccgacaaggaagcctctatggctaaatactttgctgctgaatcagcgatccaaatcgttaacgacgcgctgcaaatccatggcgggtatggctatatcaaagactacaagattgaacgtttgtaccgcgatgtgcgtgtgatcgctatttatgagggcacttccgaggtccaacagatggttatcgcgtccaatctgctgaagtaa

SEQ ID NO: 283 - DNA, 18 bp, Artificial Sequence
  Synthetic
taagaaggagatatacat

SEQ ID NO: 284 - DNA, 43 bp, Artificial Sequence; identical to SEQ ID NO: 211
  Synthetic

SEQ ID NO: 285 - DNA, 99 bp, Artificial Sequence
  Synthetic
catgctgatggttctttctctgatgagatgaacaccattcttgataatcttgccgccagggactttataaactggttgattcagaccaaaatcactgac

SEQ ID NO: 286 - DNA, 102 bp, Artificial Sequence
  Synthetic
catgctgacggctctttttctgacgaaatgaataccatcctggataatctggcggcgcgtgattttattaattggctgatccaaactaaaattactgattaa

SEQ ID NO: 287 - DNA, 162 bp, Artificial Sequence
  Synthetic
atggcacaagtcattaataccaacagcctctcgctgatcactcaaaataatatcaacaagcatgctgacggctctttttctgacgaaatgaataccatcctggataatctggcggcgcgtgattttattaattggctgatccaaactaaaattactgattaa

SEQ ID NO: 288 - DNA, 105 bp, Artificial Sequence
  Synthetic
atgcatgctgacggctctttttctgacgaaatgaataccatcctggataatctggcggcgcgtgattttattaattggctgatccaaactaaaattactgattaa

SEQ ID NO: 289 - DNA, 450 bp, Artificial Sequence
  Synthetic
atgggtactgaccaatgtgataatttcccacaaatgctgcgtgatttgcgcgacgctttctcgcgtgtgaaaactttttttcagactaaagatgaggtggataatctgctgctgaaagagagcctgttggaagattttaaaggctacttgggctgtcaagcgctgtcggagatgattcaattttatctggaagaggtgatgccgcaagctgagaaccaagatccggaagcgaaagatcacgtgaattcgctgggcgagaatctgaaaactctgcgtctgcgtctgcgtcgttgtcaccgttttttgccgtgcgaaaacaaaagtaaagctgttgagcaaattaaaaacgcttttaacaaactgcaggaaaaaggtatctataaagcgatgagcgaatttgatatttttattaattatattgaagcttatatgactattaaagctcgctaa

SEQ ID NO: 290 - DNA, 444 bp, Artificial Sequence
  Synthetic
ggtacagaccaatgtgacaattttccccaaatgttgagggacctaagagatgccttcagtcgtgttaaaacctttttccagacaaaggacgaggtagataaccttttgctcaaggagtctctgctagaggactttaagggctaccttggatgccaggccctgtcagaaatgatccaattctacctggaggaagtcatgccacaggctgaaaaccaggaccctgaagccaaagaccatgtcaattctttgggtgaaaatctaaagaccctacggctccgcctgcgccgttgccacaggttcctgccgtgtgagaacaagagtaaagctgtggaacagataaaaaatgcctttaacaagctgcaggaaaaaggaatttacaaagccatgagtgaatttgacatttttattaactacatagaagcatacatgacaattaaagccagg

SEQ ID NO: 291 - DNA, 441 bp, Artificial Sequence
  Synthetic
gcaccgatctcttcccactgtcgcttagataaatcgaattttcaacaaccttatattacgaatcgtacgtttatgctggctaaagaagcgtcattagctgataacaacactgatgttcgcctgattggtgagaaattgtttcacggtgtgtctatgtcagaacgttgctacctgatgaaacaagttctgaatttcaccctggaagaagtgttgtttccgcaatctgaccgctttcaaccgtatatgcaagaggttgtgccgtttctggcgcgcctgagtaatcgcctgagcacttgtcatattgagggcgacgacctgcatattcaacgaaatgttcaaaaattgaaagatacggtgaagaaactgggtgaaagtggtgaaatcaaagcgattggtgagctggatctgctgtttatgtcattgcgcaatgcgtgcatttaa

SEQ ID NO: 292 - DNA, 444 bp, Artificial Sequence
  Synthetic
atggcaccgatctcttcccactgtcgcttagataaatcgaattttcaacaaccttatattacgaatcgtacgtttatgctggctaaagaagcgtcattagctgataacaacactgatgttcgcctgattggtgagaaattgtttcacggtgtgtctatgtcagaacgttgctacctgatgaaacaagttctgaatttcaccctggaagaagtgttgtttccgcaatctgaccgctttcaaccgtatatgcaagaggttgtgccgtttctggcgcgcctgagtaatcgcctgagcacttgtcatattgagggcgacgacctgcatattcaacgaaatgttcaaaaattgaaagatacggtgaagaaactgggtgaaagtggtgaaatcaaagcgattggtgagctggatctgctgtttatgtcattgcgcaatgcgtgcatttaa

SEQ ID NO: 293 - DNA, 483 bp, Artificial Sequence
  Synthetic
tcgccaggtcaaggaacgcagtcagagaattcatgcactcactttccgggcaatctgccgaatatgctgcgcgatctgcgagatgcattctctcgcgtgaaaacgttctttcaaatgaaagatcaactggataatctgctgctgaaggagtcgttgttggaggattttaaggggtatctgggttgtcaagcactgtctgaaatgattcaattttacttggaggaagttatgccgcaagcggaaaaccaagatccggatattaaggcgcacgtgaactcactgggcgaaaacctgaaaactttgcgcctgcgtctgagacgatgtcaccgattcctgccgtgtgaaaacaagtcaaaggcggttgagcaagttaagaatgctttcaataagctgcaagaaaagggcatctataaagcgatgtctgaatttgatatctttataaactacatagaagcttatatgactatgaagattcgaaattaa

SEQ ID NO: 294 - DNA, 501 bp, Artificial Sequence
  Synthetic
tcgccaggtcaaggaacgcagtcagagaattcatgcactcactttccgggcaatctgccgaatatgctgcgcgatctgcgagatgcattctctcgcgtgaaaacgttctttcaaatgaaagatcaactggataatctgctgctgaaggagtcgttgttggaggattttaaggggtatctgggttgtcaagcactgtctgaaatgattcaattttacttggaggaagttatgccgcaagcggaaaaccaagatccggatattaaggcgcacgtgaactcactgggcgaaaacctgaaaactttgcgcctgcgtctgagacgatgtcaccgattcctgccgtgtgaaaacggaggaggaagtggtggtaagtcaaaggcggttgagcaagttaagaatgctttcaataagctgcaagaaaagggcatctataaagcgatgtctgaatttgatatctttataaactacatagaagcttatatgactatgaagattcgaaattaa

SEQ ID NO: 295 - DNA, 138 bp, Artificial Sequence
  Synthetic
tgacggcgattgagccgacgggtggaaacccaaaacgtaatcaacgtgggtactccttaaattgggttcgaatggaccatggcacaagtcattaataccaacagcctctcgctgatcactcaaaataatatcaacaag

SEQ ID NO: 296 - DNA, 70 bp, Artificial Sequence
  Synthetic
tgacggcgattgagccgacgggtggaaacccaaaacgtaatcaactacgaacacttacaggaggtaccca

SEQ ID NO: 297 - DNA, 70 bp, Artificial Sequence
  Synthetic
tgacggcgattgagccgacgggtggaaacccaaaacgtaatcaacaagtataaactctgggaggttccta

SEQ ID NO: 298 - DNA, 70 bp, Artificial Sequence
  Synthetic
tgacggcgattgagccgacgggtggaaacccaaaacgtaatcaactcaaatcccttaataaggaggtaaa

SEQ ID NO: 299 - DNA, 106 bp, Artificial Sequence
  Synthetic
ctctagaaataattttgtttaactttaagaaggagatatacatatgaaacaaagcactattgcactggcactcttaccgttactgtttacccctgtgacaaaagcg

SEQ ID NO: 300 - DNA, 63 bp, Artificial Sequence
  Synthetic
atgaaacaaagcactattgcactggcactcttaccgttactgtttacccctgtgacaaaagcg

SEQ ID NO: 301 - DNA, 109 bp, Artificial Sequence
  Synthetic
ctctagaaataattttgtttaactttaagaaggagatatacatatgatgaagcgcaatattctggcagtgatcgtccctgctctgttagtagcaggtactgcaaacgct

SEQ ID NO: 302 - DNA, 66 bp, Artificial Sequence
  Synthetic
atgatgaagcgcaatattctggcagtgatcgtccctgctctgttagtagcaggtactgcaaacgct

SEQ ID NO: 303 - DNA, 88 bp, Artificial Sequence
  Synthetic
ctctagaaataattttgtttaactttaagaaggagatatacatatgagaactctgactctaaatgaattagattctgtttctggtggt

SEQ ID NO: 304 - DNA, 45 bp, Artificial Sequence
  Synthetic
atgagaactctgactctaaatgaattagattctgtttctggtggt

SEQ ID NO: 305 - DNA, 88 bp, Artificial Sequence
  Synthetic
gacgccagagagttaagggggttaaatgaaacaatcgaccatcgcattggcgctgcttcctctattgttcacaccggtgacaaaggca

SEQ ID NO: 306 - DNA, 63 bp, Artificial Sequence
  Synthetic
atgaaacaatcgaccatcgcattggcgctgcttcctctattgttcacaccggtgacaaaggca

SEQ ID NO: 307 - DNA, 160 bp, Artificial Sequence
  Synthetic
ctctagaaataattttgtttaactttaagaaggagatatacatatgaacaataacgatctctttcaggcatcacgtcggcgttttctggcacaactcggcggcttaaccgtcgccgggatgctggggccgtcattgttaacgccgcgacgtgcgactgcg

SEQ ID NO: 308 - DNA, 117 bp, Artificial Sequence
  Synthetic
atgaacaataacgatctctttcaggcatcacgtcggcgttttctggcacaactcggcggcttaaccgtcgccgggatgctggggccgtcattgttaacgccgcgacgtgcgactgcg

SEQ ID NO: 309 - DNA, 148 bp, Artificial Sequence
  Synthetic
cccacattcgaggtactaaatgaacaataacgatctctttcaggcatcacgtcggcgttttctggcacaactcggcggcttaaccgtcgccgggatgctggggacgtcattgttaacgccgcgccgtgcgactgcggcgcaagcggcg

SEQ ID NO: 310 - DNA, 129 bp, Artificial Sequence
  Synthetic
atgaacaataacgatctctttcaggcatcacgtcggcgttttctggcacaactcggcggcttaaccgtcgccgggatgctggggacgtcattgttaacgccgcgccgtgcgactgcggcgcaagcggcg

SEQ ID NO: 311 - DNA, 130 bp, Artificial Sequence
  Synthetic
accctattacacacctaaggaggccaaatacatggacgtcagtcgcagacaattttttaaaatctgcgcgggcggtatggcgggaacaacagtagcagcattgggctttgccccgaagcaagcactggct

SEQ ID NO: 312 - DNA, 99 bp, Artificial Sequence
  Synthetic
atggacgtcagtcgcagacaattttttaaaatctgcgcgggcggtatggcgggaacaacagtagcagcattgggctttgccccgaagcaagcactggct

SEQ ID NO: 313 - DNA, 168 bp, Artificial Sequence
  Synthetic
tacgcaaaaaacataatttaagagaggataaacatgaaaacgaaaatccctgatgcggtattggctgctgaggtgagtcgccgtggtttggtaaaaacgacagcgatcggcggcctggcaatggccagcagcgcattaacattaccttttagtcggattgcgcacgct

SEQ ID NO: 314 - DNA, 135 bp, Artificial Sequence
  Synthetic
atgaaaacgaaaatccctgatgcggtattggctgctgaggtgagtcgccgtggtttggtaaaaacgacagcgatcggcggcctggcaatggccagcagcgcattaacattaccttttagtcggattgcgcacgct

SEQ ID NO: 315 - DNA, 712 bp, Artificial Sequence
  Synthetic
gaattcgttaagacccactttcacatttaagttgtttttctaatccgcatatgatcaattcaaggccgaataagaaggctggctctgcaccttggtgatcaaataattcgatagcttgtcgtaataatggcggcatactatcagtagtaggtgtttccctttcttctttagcgacttgatgctcttgatcttccaatacgcaacctaaagtaaaatgccccacagcgctgagtgcatataatgcattctctagtgaaaaaccttgttggcataaaaaggctaattgattttcgagagtttcatactgtttttctgtaggccgtgtacctaaatgtacttttgctccatcgcgatgacttagtaaagcacatctaaaacttttagcgttattacgtaaaaaatcttgccagctttccccttctaaagggcaaaagtgagtatggtgcctatctaacatctcaatggctaaggcgtcgagcaaagcccgcttattttttacatgccaatacaatgtaggctgctctacacctagcttctgggcgagtttacgggttgttaaaccttcgattccgacctcattaagcagctctaatgcgctgttaatcactttacttttatctaatctagacatcattaattcctaatttttgttgacactctatcattgatagagttattttaccactccctatcagtgatagagaaaagtgaa

SEQ ID NO: 316 - DNA, 104 bp, Artificial Sequence
  Synthetic
agcgggaataaggggcagagaaaagagtatttcgtcgactaacaaaaaatggctgtttgtgaaaaaaattctaaaggttgttttacgacagacgataacagggt

SEQ ID NO: 317 - DNA, 162 bp, Artificial Sequence
  Synthetic
ggtaccagttgttcttattggtggtgttgctttatggttgcatcgtagtaaatggttgtaacaaaagcaatttttccggctgtctgtatacaaaaacgccgcaaagtttgagcgaagtcaataaactctctacccattcagggcaatatctctcttggatcc

SEQ ID NO: 318 - DNA, 358 bp, Artificial Sequence
  Synthetic
cacatttccccgaaaagtgccgatggccccccgatggtagtgtggcccatgcgagagtagggaactgccaggcatcaaataaaacgaaaggctcagtcgaaagactgggcctttcgttttatctgttgtttgtcggtgaacgctctcctgagtaggacaaatccgccgggagcggatttgaacgttgcgaagcaacggcccggagggtggcgggcaggacgcccgccataaactgccaggcatcaaattaagcagaaggccatcctgacggatggcctttttgcgtggccagtgccaagcttgcatgcagattgcagcattacacgtcttgagcgattgtgtaggctggagctgcttc

SEQ ID NO: 319 - DNA, 48 bp, Artificial Sequence
  Synthetic
gaagttcctatactttctagagaataggaacttcggaataggaacttc

SEQ ID NO: 320 - DNA, 1345 bp, Artificial Sequence
  Synthetic
aagatcccctcacgctgccgcaagcactcagggcgcaagggctgctaaaggaagcggaacacgtagaaagccagtccgcagaaacggtgctgaccccggatgaatgtcagctactgggctatctggacaagggaaaacgcaagcgcaaagagaaagcaggtagcttgcagtgggcttacatggcgatagctagactgggcggttttatggacagcaagcgaaccggaattgccagctggggcgccctctggtaaggttgggaagccctgcaaagtaaactggatggctttcttgccgccaaggatctgatggcgcaggggatcaagatctgatcaagagacaggatgaggatcgtttcgcatgattgaacaagatggattgcacgcaggttctccggccgcttgggtggagaggctattcggctatgactgggcacaacagacaatcggctgctctgatgccgccgtgttccggctgtcagcgcaggggcgcccggttctttttgtcaagaccgacctgtccggtgccctgaatgaactgcaggacgaggcagcgcggctatcgtggctggccacgacgggcgttccttgcgcagctgtgctcgacgttgtcactgaagcgggaagggactggctgctattgggcgaagtgccggggcaggatctcctgtcatctcaccttgctcctgccgagaaagtatccatcatggctgatgcaatgcggcggctgcatacgcttgatccggctacctgcccattcgaccaccaagcgaaacatcgcatcgagcgagcacgtactcggatggaagccggtcttgtcgatcaggatgatctggacgaagagcatcaggggctcgcgccagccgaactgttcgccaggctcaaggcgcgcatgcccgacggcgaggatctcgtcgtgacccatggcgatgcctgcttgccgaatatcatggtggaaaatggccgcttttctggattcatcgactgtggccggctgggtgtggcggaccgctatcaggacatagcgttggctacccgtgatattgctgaagagcttggcggcgaatgggctgaccgcttcctcgtgctttacggtatcgccgctcccgattcgcagcgcatcgccttctatcgccttcttgacgagttcttctgagcgggactctggggttcgaaatgaccgaccaagcgacgcccaacctgccatcacgagatttcgattccaccgccgccttctatgaaaggttgggcttcggaatcgttttccgggacgccggctggatgatcctccagcgcggggatctcatgctggagttcttcgcccaccccagcttcaaaagcgctct

SEQ ID NO: 321 - DNA, 2388 bp, Artificial Sequence
  Synthetic
cgttccttgtagggcgtcatagcgttcgacggcattaagtaacccaatgccgcccgcctgtagcagatcgtcaagttccacgctcgcgggcagtcgaacctgcaggcgcaatgcttcgtgacgcaccagcgggacataacgctgccacagcgagtgtttatccattacaccttcagcggtatagagtgaattcacgataaacagccctgcgttatatgagttatcggcatgattatccgtttctgcagggtttttaatcggacgattagtgggtgaaatgaggggttatttgggggttaccggtaaattgcgggcagaaaaaaccccgccgttggcggggaagcacgttgctggcaaattaccattcatgttgccggatgcggcgtaaacgccttatccggcctacaaaaatgtgcaaattcaataaattgcaattccccttgtaggcctgataagcgcagcgcatcaggcaatttggcgttgccgtcagtctcagttaatcaggttacggcgattaatcagtaattttagtttggatcagccaattaataaaatcacgcgccgccagattatccaggatggtattcatttcgtcagaaaaagagccgtcagcatgcattaggaacctcccagagtttatacttgttgattacgttttgggtttccacccgtcggctcaatcgccgtcaaccctgttatcgtctgtcgtaaaacaacctttagaatttttttcacaaacagccattttttgttagtcgacgaaatactcttttctctgccccttattcccgctattaaaaaaaacaattaaacgtaaactttgcgcaattcaggccgataaccccggtattcgttttacgtgtcgaaagataaacgaagttcctatactttctagagaataggaacttcggaataggaacttcatttctcgttcgctgccacctaagaatactctacggtcacatacaaatggcgcgccttacgccccgccctgccactcatcgcagtactgttgtattcattaagcatctgccgacatggaagccatcacaaacggcatgatgaacctgaatcgccagcggcatcagcaccttgtcgccttgcgtataatatttgcccatggtgaaaacgggggcgaagaagttgtccatattggccacgtttaaatcaaaactggtgaaactcacccagggattggctgagacgaaaaacatattctcaataaaccctttagggaaataggccaggttttcaccgtaacacgccacatcttgcgaatatatgtgtagaaactgccggaaatcgtcgtggtattcactccagagcgatgaaaacgtttcagtttgctcatggaaaacggtgtaacaagggtgaacactatcccatatcaccagctcaccgtctttcattgccatacgtaattccggatgagcattcatcaggcgggcaagaatgtgaataaaggccggataaaacttgtgcttatttttctttacggtctttaaaaaggccgtaatatccagctgaacggtctggttataggtacattgagcaactgactgaaatgcctcaaaatgttctttacgatgccattgggatatatcaacggtggtatatccagtgatttttttctccattttagcttccttagctcctgaaaatctcgacaactcaaaaaatacgcccggtagtgatcttatttcattatggtgaaagttggaacctcttacgtgccgatcaacgtctcattttcgccaaaagttggcccagggcttcccggtatcaacagggacaccaggatttatttattctgcgaagtgatcttccgtcacaggtaggcgcgccgaagttcctatactttctagagaataggaacttcggaataggaactctcaccgccgcgcaaaaagcgacgctaacccctatttcaaatcagcaatcgtcgtttaccgctaaacttagcgcctacggtacgctgaaaagcgcgctgacgactttccagaccgccaatactgcattgtctaaagccgatcttttttccgctaccagcaccaccagcagcaccaccgcgttcagtgccaccaccgcgggtaatgccatcgccgggaaatacaccatcagcgtcacccatctggcgcaggcgcaaaccctgacaacgcgcaccaccagagacgatacgaaaacggcgatcgccaccagcgacagcaaactcaccattcaacaaggcggcgacaaagatccgatttccattgatatcagcgcggctaactcgtctttaagcgggatccgtgatgccatcaacaacgcaaaagcaggcgtaagcgcaagcatcattaacgtgggtaacggtgaatatcgtctgtcagtcacatcaaatgacaccggcct

SEQ ID NO: 322 - DNA, 176 bp, Artificial Sequence
  Synthetic
attaatcagtaattttagtttggatcagccaattaataaaatcacgcgccgccagattatccaggatggtattcatttcgtcagaaaaagagccgtcagcatgcattaggaacctcccagagtttatacttgttgattacgttttgggtttccacccgtcggctcaatcgccgtca

SEQ ID NO: 323 - DNA, 3118 bp, Artificial Sequence
  Synthetic
cgttccttgtagggcgtcatagcgttcgacggcattaagtaacccaatgccgcccgcctgtagcagatcgtcaagttccacgctcgcgggcagtcgaacctgcaggcgcaatgcttcgtgacgcaccagcgggacataacgctgccacagcgagtgtttatccattacaccttcagcggtatagagtgaattcacgataaacagccctgcgttatatgagttatcggcatgattatccgtttctgcagggtttttaatcggacgattagtgggtgaaatgaggggttatttgggggttaccggtaaattgcgggcagaaaaaaccccgccgttggcggggaagcacgttgctggcaaattaccattcatgttgccggatgcggcgtaaacgccttatccggcctacaaaaatgtgcaaattcaataaattgcaattccccttgtaggcctgataagcgcagcgcatcaggcaatttggcgttgccgtcagtctcagttaatcaggttacggcgattaatcagtaattttagtttggatcagccaattaataaaatcacgcgccgccagattatccaggatggtattcatttcgtcagaaaaagagccgtcagcatgcttgttgatattattttgagtgatcagcgagaggctgttggtattaatgacttgtgccatggtccattcgaacccaatttaaggagtacccacgttgattacgttttgggtttccacccgtcggctcaatcgccgtcattctctatcactgatagggagtggtaaaataactctatcaatgatagagtgtcaacaaaaattaggaattaatgatgtctagattagataaaagtaaagtgattaacagcgcattagagctgcttaatgaggtcggaatcgaaggtttaacaacccgtaaactcgcccagaagctaggtgtagagcagcctacattgtattggcatgtaaaaaataagcgggctttgctcgacgccttagccattgagatgttagataggcaccatactcacttttgccctttagaaggggaaagctggcaagattttttacgtaataacgctaaaagttttagatgtgctttactaagtcatcgcgatggagcaaaagtacatttaggtacacggcctacagaaaaacagtatgaaactctcgaaaatcaattagcctttttatgccaacaaggtttttcactagagaatgcattatatgcactcagcgctgtggggcattttactttaggttgcgtattggaagatcaagagcatcaagtcgctaaagaagaaagggaaacacctactactgatagtatgccgccattattacgacaagctatcgaattatttgatcaccaaggtgcagagccagccttcttattcggccttgaattgatcatatgcggattagaaaaacaacttaaatgtgaaagtgggtcttaagaatttttttcacaaacagccattttttgttagtcgacgaaatactcttttctctgccccttattcccgctattaaaaaaaacaattaaacgtaaactttgcgcaattcaggccgataaccccggtattcgttttacgtgtcgaaagataaacgaagttcctatactttctagagaataggaacttcggaataggaacttcatttctcgttcgctgccacctaagaatactctacggtcacatacaaatggcgcgccttacgccccgccctgccactcatcgcagtactgttgtattcattaagcatctgccgacatggaagccatcacaaacggcatgatgaacctgaatcgccagcggcatcagcaccttgtcgccttgcgtataatatttgcccatggtgaaaacgggggcgaagaagttgtccatattggccacgtttaaatcaaaactggtgaaactcacccagggattggctgagacgaaaaacatattctcaataaaccctttagggaaataggccaggttttcaccgtaacacgccacatcttgcgaatatatgtgtagaaactgccggaaatcgtcgtggtattcactccagagcgatgaaaacgtttcagtttgctcatggaaaacggtgtaacaagggtgaacactatcccatatcaccagctcaccgtctttcattgccatacgtaattccggatgagcattcatcaggcgggcaagaatgtgaataaaggccggataaaacttgtgcttatttttctttacggtctttaaaaaggccgtaatatccagctgaacggtctggttataggtacattgagcaactgactgaaatgcctcaaaatgttctttacgatgccattgggatatatcaacggtggtatatccagtgatttttttctccattttagcttccttagctcctgaaaatctcgacaactcaaaaaatacgcccggtagtgatcttatttcattatggtgaaagttggaacctcttacgtgccgatcaacgtctcattttcgccaaaagttggcccagggcttcccggtatcaacagggacaccaggatttatttattctgcgaagtgatcttccgtcacaggtaggcgcgccgaagttcctatactttctagagaataggaacttcggaataggaactctcaccgccgcgcaaaaagcgacgctaacccctatttcaaatcagcaatcgtcgtttaccgctaaacttagcgcctacggtacgctgaaaagcgcgctgacgactttccagaccgccaatactgcattgtctaaagccgatcttttttccgctaccagcaccaccagcagcaccaccgcgttcagtgccaccaccgcgggtaatgccatcgccgggaaatacaccatcagcgtcacccatctggcgcaggcgcaaaccctgacaacgcgcaccaccagagacgatacgaaaacggcgatcgccaccagcgacagcaaactcaccattcaacaaggcggcgacaaagatccgatttccattgatatcagcgcggctaactcgtctttaagcgggatccgtgatgccatcaacaacgcaaaagcaggcgtaagcgcaagcatcattaacgtgggtaacggtgaatatcgtctgtcagtcacatcaaatgacaccggcct

SEQ ID NO: 324 - DNA, 162 bp, Artificial Sequence
  Synthetic
ttaatcagtaattttagtttggatcagccaattaataaaatcacgcgccgccagattatccaggatggtattcatttcgtcagaaaaagagccgtcagcatgcttgttgatattattttgagtgatcagcgagaggctgttggtattaatgacttgtgccat

SEQ ID NO: 325 - DNA, 1326 bp, Artificial Sequence
  Synthetic
ttaagacccactttcacatttaagttgtttttctaatccgcatatgatcaattcaaggccgaataagaaggctggctctgcaccttggtgatcaaataattcgatagcttgtcgtaataatggcggcatactatcagtagtaggtgtttccctttcttctttagcgacttgatgctcttgatcttccaatacgcaacctaaagtaaaatgccccacagcgctgagtgcatataatgcattctctagtgaaaaaccttgttggcataaaaaggctaattgattttcgagagtttcatactgtttttctgtaggccgtgtacctaaatgtacttttgctccatcgcgatgacttagtaaagcacatctaaaacttttagcgttattacgtaaaaaatcttgccagctttccccttctaaagggcaaaagtgagtatggtgcctatctaacatctcaatggctaaggcgtcgagcaaagcccgcttattttttacatgccaatacaatgtaggctgctctacacctagcttctgggcgagtttacgggttgttaaaccttcgattccgacctcattaagcagctctaatgcgctgttaatcactttacttttatctaatctagacatcattaattcctaatttttgttgacactctatcattgatagagttattttaccactccctatcagtgatagagaaaagtgaactctagaaataattttgtttaactttaagaaggagatatacatatgatgaagcgcaatattctggcagtgatcgtccctgctctgttagtagcaggtactgcaaacgctcatgctgatggttctttctctgatgagatgaacaccattcttgataatcttgccgccagggactttataaactggttgattcagaccaaaatcactgacaggtgacacatttccccgaaaagtgccgatggccccccgatggtagtgtggccccatgcgagagtagggaactgccaggcatcaaataaaacgaaaggctcagtcgaaagactgggcctttcgttttatctgttgtttgtcggtgaacgctctcctgagtaggacaaatccgccgggagcggatttgaacgttgcgaagcaacggcccggagggtggcgggcaggacgcccgccataaactgccaggcatcaaattaagcagaaggccatcctgacggatggcctttttgcgtggccagtgccaagcttgcatgcagattgcagcattacacgtcttgagcgattgtgtaggctggagctgcttcgaagttcctatactttctagagaataggaacttcggaataggaacttc

SEQ ID NO: 326 - DNA, 171 bp, Artificial Sequence
  Synthetic
atgatgaagcgcaatattctggcagtgatcgtccctgctctgttagtagcaggtactgcaaacgctcatgctgatggttctttctctgatgagatgaacaccattcttgataatcttgccgccagggactttataaactggttgattcagaccaaaatcactgacaggtga

SEQ ID NO: 327 - DNA, 1375 bp, Artificial Sequence
  Synthetic
taagacccactttcacatttaagttgtttttctaatccgcatatgatcaattcaaggccgaataagaaggctggctctgcaccttggtgatcaaataattcgatagcttgtcgtaataatggcggcatactatcagtagtaggtgtttccctttcttctttagcgacttgatgctcttgatcttccaatacgcaacctaaagtaaaatgccccacagcgctgagtgcatataatgcattctctagtgaaaaaccttgttggcataaaaaggctaattgattttcgagagtttcatactgtttttctgtaggccgtgtacctaaatgtacttttgctccatcgcgatgacttagtaaagcacatctaaaacttttagcgttattacgtaaaaaatcttgccagctttccccttctaaagggcaaaagtgagtatggtgcctatctaacatctcaatggctaaggcgtcgagcaaagcccgcttattttttacatgccaatacaatgtaggctgctctacacctagcttctgggcgagtttacgggttgttaaaccttcgattccgacctcattaagcagctctaatgcgctgttaatcactttacttttatctaatctagacatcattaattcctaatttttgttgacactctatcattgatagagttattttaccactccctatcagtgatagagaaaagtgaactctagaaataattttgtttaactttaagaaggagatatacatatgaacaataacgatctctttcaggcatcacgtcggcgttttctggcacaactcggcggcttaaccgtcgccgggatgctggggccgtcattgttaacgccgcgacgtgcgactgcgcatgctgatggttctttctctgatgagatgaacaccattcttgataatcttgccgccagggactttataaactggttgattcagaccaaaatcactgactaataacacatttccccgaaaagtgccgatggccccccgatggtagtgtggcccatgcgagagtagggaactgccaggcatcaaataaaacgaaaggctcagtcgaaagactgggcctttcgttttatctgttgtttgtcggtgaacgctctcctgagtaggacaaatccgccgggagcggatttgaacgttgcgaagcaacggcccggagggtggcgggcaggacgcccgccataaactgccaggcatcaaattaagcagaaggccatcctgacggatggcctttttgcgtggccagtgccaagcttgcatgcagattgcagcattacacgtcttgagcgattgtgtaggctggagctgcttcgaagttcctatactttctagagaataggaacttcggaataggaacttc

SEQ ID NO: 328 - DNA, 216 bp, Artificial Sequence
  Synthetic
atgaacaataacgatctctttcaggcatcacgtcggcgttttctggcacaactcggcggcttaaccgtcgccgggatgctggggccgtcattgttaacgccgcgacgtgcgactgcgcatgctgatggttctttctctgatgagatgaacaccattcttgataatcttgccgccagggactttataaactggttgattcagaccaaaatcactgac

SEQ ID NO: 329 - DNA, 1283 bp, Artificial Sequence
  Synthetic
gaattcgttaagacccactttcacatttaagttgtttttctaatccgcatatgatcaattcaaggccgaataagaaggctggctctgcaccttggtgatcaaataattcgatagcttgtcgtaataatggcggcatactatcagtagtaggtgtttccctttcttctttagcgacttgatgctcttgatcttccaatacgcaacctaaagtaaaatgccccacagcgctgagtgcatataatgcattctctagtgaaaaaccttgttggcataaaaaggctaattgattttcgagagtttcatactgtttttctgtaggccgtgtacctaaatgtacttttgctccatcgcgatgacttagtaaagcacatctaaaacttttagcgttattacgtaaaaaatcttgccagctttccccttctaaagggcaaaagtgagtatggtgcctatctaacatctcaatggctaaggcgtcgagcaaagcccgcttattttttacatgccaatacaatgtaggctgctctacacctagcttctgggcgagtttacgggttgttaaaccttcgattccgacctcattaagcagctctaatgcgctgttaatcactttacttttatctaatctagacatcattaattcctaatttttgttgacactctatcattgatagagttattttaccactccctatcagtgatagagaaaagtgaagacgccagagagttaagggggttaaatgaaacaatcgaccatcgcattggcgctgcttcctctattgttcacaccggtgacaaaggcatcgccaggtcaaggaacgcagtcagagaattcatgcactcactttccgggcaatctgccgaatatgctgcgcgatctgcgagatgcattctctcgcgtgaaaacgttctttcaaatgaaagatcaactggataatctgctgctgaaggagtcgttgttggaggattttaaggggtatctgggttgtcaagcactgtctgaaatgattcaattttacttggaggaagttatgccgcaagcggaaaaccaagatccggatattaaggcgcacgtgaactcactgggcgaaaacctgaaaactttgcgcctgcgtctgagacgatgtcaccgattcctgccgtgtgaaaacaagtcaaaggcggttgagcaagttaagaatgctttcaataagctgcaagaaaagggcatctataaagcgatgtctgaatttgatatctttataaactacatagaagcttatatgactatgaagattcgaaattaa

SEQ ID NO: 330 - DNA, 571 bp, Artificial Sequence
  Synthetic
gacgccagagagttaagggggttaaatgaaacaatcgaccatcgcattggcgctgcttcctctattgttcacaccggtgacaaaggcatcgccaggtcaaggaacgcagtcagagaattcatgcactcactttccgggcaatctgccgaatatgctgcgcgatctgcgagatgcattctctcgcgtgaaaacgttctttcaaatgaaagatcaactggataatctgctgctgaaggagtcgttgttggaggattttaaggggtatctgggttgtcaagcactgtctgaaatgattcaattttacttggaggaagttatgccgcaagcggaaaaccaagatccggatattaaggcgcacgtgaactcactgggcgaaaacctgaaaactttgcgcctgcgtctgagacgatgtcaccgattcctgccgtgtgaaaacaagtcaaaggcggttgagcaagttaagaatgctttcaataagctgcaagaaaagggcatctataaagcgatgtctgaatttgatatctttataaactacatagaagcttatatgactatgaagattcgaaattaa

SEQ ID NO: 331 - DNA, 520 bp, Artificial Sequence
  Synthetic
tgacggcgattgagccgacgggtggaaacccaaaacgtaatcaactcaaatcccttaataaggaggtaaaatgggtactgaccaatgtgataatttcccacaaatgctgcgtgatttgcgcgacgctttctcgcgtgtgaaaactttttttcagactaaagatgaggtggataatctgctgctgaaagagagcctgttggaagattttaaaggctacttgggctgtcaagcgctgtcggagatgattcaattttatctggaagaggtgatgccgcaagctgagaaccaagatccggaagcgaaagatcacgtgaattcgctgggcgagaatctgaaaactctgcgtctgcgtctgcgtcgttgtcaccgttttttgccgtgcgaaaacaaaagtaaagctgttgagcaaattaaaaacgcttttaacaaactgcaggaaaaaggtatctataaagcgatgagcgaatttgatatttttattaattatattgaagcttatatgactattaaagctcgctaa

SEQ ID NO: 332 - DNA, 1244 bp, Artificial Sequence
  Synthetic
gaattcgttaagacccactttcacatttaagttgtttttctaatccgcatatgatcaattcaaggccgaataagaaggctggctctgcaccttggtgatcaaataattcgatagcttgtcgtaataatggcggcatactatcagtagtaggtgtttccctttcttctttagcgacttgatgctcttgatcttccaatacgcaacctaaagtaaaatgccccacagcgctgagtgcatataatgcattctctagtgaaaaaccttgttggcataaaaaggctaattgattttcgagagtttcatactgtttttctgtaggccgtgtacctaaatgtacttttgctccatcgcgatgacttagtaaagcacatctaaaacttttagcgttattacgtaaaaaatcttgccagctttccccttctaaagggcaaaagtgagtatggtgcctatctaacatctcaatggctaaggcgtcgagcaaagcccgcttattttttacatgccaatacaatgtaggctgctctacacctagcttctgggcgagtttacgggttgttaaaccttcgattccgacctcattaagcagctctaatgcgctgttaatcactttacttttatctaatctagacatcattaattcctaatttttgttgacactctatcattgatagagttattttaccactccctatcagtgatagagaaaagtgaagacgccagagagttaagggggttaaatgaaacaatcgaccatcgcattggcgctgcttcctctattgttcacaccggtgacaaaggcaggtacagaccaatgtgacaattttccccaaatgttgagggacctaagagatgccttcagtcgtgttaaaacctttttccagacaaaggacgaggtagataaccttttgctcaaggagtctctgctagaggactttaagggctaccttggatgccaggccctgtcagaaatgatccaattctacctggaggaagtcatgccacaggctgaaaaccaggaccctgaagccaaagaccatgtcaattctttgggtgaaaatctaaagaccctacggctccgcctgcgccgttgccacaggttcctgccgtgtgagaacaagagtaaagctgtggaacagataaaaaatgcctttaacaagctgcaggaaaaaggaatttacaaagccatgagtgaatttgacatttttattaactacatagaagcatacatgacaattaaagccagg

SEQ ID NO: 333 - DNA, 532 bp, Artificial Sequence
  Synthetic
gacgccagagagttaagggggttaaatgaaacaatcgaccatcgcattggcgctgcttcctctattgttcacaccggtgacaaaggcaggtacagaccaatgtgacaattttccccaaatgttgagggacctaagagatgccttcagtcgtgttaaaacctttttccagacaaaggacgaggtagataaccttttgctcaaggagtctctgctagaggactttaagggctaccttggatgccaggccctgtcagaaatgatccaattctacctggaggaagtcatgccacaggctgaaaaccaggaccctgaagccaaagaccatgtcaattctttgggtgaaaatctaaagaccctacggctccgcctgcgccgttgccacaggttcctgccgtgtgagaacaagagtaaagctgtggaacagataaaaaatgcctttaacaagctgcaggaaaaaggaatttacaaagccatgagtgaatttgacatttttattaactacatagaagcatacatgacaattaaagccagg

SEQ ID NO: 334 - DNA, 1241 bp, Artificial Sequence
  Synthetic
gaattcgttaagacccactttcacatttaagttgtttttctaatccgcatatgatcaattcaaggccgaataagaaggctggctctgcaccttggtgatcaaataattcgatagcttgtcgtaataatggcggcatactatcagtagtaggtgtttccctttcttctttagcgacttgatgctcttgatcttccaatacgcaacctaaagtaaaatgccccacagcgctgagtgcatataatgcattctctagtgaaaaaccttgttggcataaaaaggctaattgattttcgagagtttcatactgtttttctgtaggccgtgtacctaaatgtacttttgctccatcgcgatgacttagtaaagcacatctaaaacttttagcgttattacgtaaaaaatcttgccagctttccccttctaaagggcaaaagtgagtatggtgcctatctaacatctcaatggctaaggcgtcgagcaaagcccgcttattttttacatgccaatacaatgtaggctgctctacacctagcttctgggcgagtttacgggttgttaaaccttcgattccgacctcattaagcagctctaatgcgctgttaatcactttacttttatctaatctagacatcattaattcctaatttttgttgacactctatcattgatagagttattttaccactccctatcagtgatagagaaaagtgaagacgccagagagttaagggggttaaatgaaacaatcgaccatcgcattggcgctgcttcctctattgttcacaccggtgacaaaggcagcaccgatctcttcccactgtcgcttagataaatcgaattttcaacaaccttatattacgaatcgtacgtttatgctggctaaagaagcgtcattagctgataacaacactgatgttcgcctgattggtgagaaattgtttcacggtgtgtctatgtcagaacgttgctacctgatgaaacaagttctgaatttcaccctggaagaagtgttgtttccgcaatctgaccgctttcaaccgtatatgcaagaggttgtgccgtttctggcgcgcctgagtaatcgcctgagcacttgtcatattgagggcgacgacctgcatattcaacgaaatgttcaaaaattgaaagatacggtgaagaaactgggtgaaagtggtgaaatcaaagcgattggtgagctggatctgctgtttatgtcattgcgcaatgcgtgcatttaa

SEQ ID NO: 335 - DNA, 529 bp, Artificial Sequence
  Synthetic
gacgccagagagttaagggggttaaatgaaacaatcgaccatcgcattggcgctgcttcctctattgttcacaccggtgacaaaggcagcaccgatctcttcccactgtcgcttagataaatcgaattttcaacaaccttatattacgaatcgtacgtttatgctggctaaagaagcgtcattagctgataacaacactgatgttcgcctgattggtgagaaattgtttcacggtgtgtctatgtcagaacgttgctacctgatgaaacaagttctgaatttcaccctggaagaagtgttgtttccgcaatctgaccgctttcaaccgtatatgcaagaggttgtgccgtttctggcgcgcctgagtaatcgcctgagcacttgtcatattgagggcgacgacctgcatattcaacgaaatgttcaaaaattgaaagatacggtgaagaaactgggtgaaagtggtgaaatcaaagcgattggtgagctggatctgctgtttatgtcattgcgcaatgcgtgcatttaa

SEQ ID NO: 336 - DNA, 88 bp, Artificial Sequence; identical to SEQ ID NO: 305
  Synthetic

SEQ ID NO: 337 - DNA, 289 bp, Artificial Sequence
  Synthetic
taattcctaatttttgttgacactctatcattgatagagttattttaccactccctatcagtgatagagaaaagtgaaccaaaacagagtcatatttaaaggaaggtacaaaatgaagcagagcaccatcgcgcttgccctgctgccgttgcttttcacgcctgtcaccaaggctcacgatgaatttgagagacatgcagaaggaacgttcacatctgatgtgtcatcatatttggaaggccaagctgccaaagaattcatcgcatggttggtgaaaggccgaggatga

SEQ ID NO: 338 - DNA, 286 bp, Artificial Sequence
  Synthetic
taattcctaatttttgttgacactctatcattgatagagttattttaccactccctatcagtgatagagaaaagtgaaataagtttatcaaaataaaaggaggtaatatatgaagcagagcaccatcgcgcttgccctgctgccgttgcttttcacgcctgtcaccaaggctcacgatgaatttgagagacatgcagaaggaacgttcacatctgatgtgtcatcatatttggaaggccaagctgccaaagaattcatcgcatggttggtgaaaggccgaggatga

SEQ ID NO: 339 - DNA, 288 bp, Artificial Sequence
  Synthetic
taattcctaatttttgttgacactctatcattgatagagttattttaccactccctatcagtgatagagaaaagtgaagtcttcccgatcctttcccgagcgtacaaaatgatgaagcgtaacatcttagccgttattgtccccgcattgcttgtggccgggacggctaacgcacacgatgaatttgagagacatgcagaaggaacgttcacatctgatgtgtcatcatatttggaaggccaagctgccaaagaattcatcgcatggttggtgaaaggccgaggatga

SEQ ID NO: 340 - DNA, 289 bp, Artificial Sequence
  Synthetic
taattcctaatttttgttgacactctatcattgatagagttattttaccactccctatcagtgatagagaaaagtgaaaaaaccgccatcaagagttaaggaggagaatatgatgaagcgtaacatcttagccgttattgtccccgcattgcttgtggccgggacggctaacgcacacgatgaatttgagagacatgcagaaggaacgttcacatctgatgtgtcatcatatttggaaggccaagctgccaaagaattcatcgcatggttggtgaaaggccgaggatga

SEQ ID NO: 341 - DNA, 34 bp, Artificial Sequence
  Synthetic
ccaaaacagagtcatatttaaaggaaggtacaaa

SEQ ID NO: 342 - DNA, 31 bp, Artificial Sequence
  Synthetic
aaaaccgccatcaagagttaaggaggagaat

SEQ ID NO: 343 - DNA, 31 bp, Artificial Sequence
  Synthetic
ataagtttatcaaaataaaaggaggtaatat

SEQ ID NO: 344 - DNA, 63 bp, Artificial Sequence
  Synthetic
atgaagcagagcaccatcgcgcttgccctgctgccgttgcttttcacgcctgtcaccaaggct

SEQ ID NO: 345 - DNA, 66 bp, Artificial Sequence
  Synthetic
atgatgaagcgtaacatcttagccgttattgtccccgcattgcttgtggccgggacggctaacgca

SEQ ID NO: 346 - DNA, 114 bp, Artificial Sequence
  Synthetic
cacgatgaatttgagagacatgcagaaggaacgttcacatctgatgtgtcatcatatttggaaggccaagctgccaaagaattcatcgcatggttggtgaaaggccgaggatga

SEQ ID NO: 347 - DNA, 177 bp, Artificial Sequence
  Synthetic
atgaagcagagcaccatcgcgcttgccctgctgccgttgcttttcacgcctgtcaccaaggctcacgatgaatttgagagacatgcagaaggaacgttcacatctgatgtgtcatcatatttggaaggccaagctgccaaagaattcatcgcatggttggtgaaaggccgaggatga

SEQ ID NO: 348 - DNA, 180 bp, Artificial Sequence
  Synthetic
atgatgaagcgtaacatcttagccgttattgtccccgcattgcttgtggccgggacggctaacgcacacgatgaatttgagagacatgcagaaggaacgttcacatctgatgtgtcatcatatttggaaggccaagctgccaaagaattcatcgcatggttggtgaaaggccgaggatga

SEQ ID NO: 349 - DNA, 131 bp, Artificial Sequence
  Synthetic
aacgattggtaaacccggtgaacgcatgagaaagcccccggaagatcaccttccgggggcttttttattgcgcggaccaaaacgaaaaaagacgctcgaaagcgtctcttttctggaatttggtaccgagg

SEQ ID NO: 350 - DNA, 967 bp, Artificial Sequence
  Synthetic
caaatatcacataatcttaacatatcaataaacacagtaaagtttcatgtgaaaaacatcaaacataaaatacaagctcggaatacgaatcacgctatacacattgctaacaggaatgagattatctaaatgaggattgatatattaattggacatactagtttttttcatcaaaccagtagagataacttccttcactatctcaatgaggaagaaataaaacgctatgatcagtttcattttgtgagtgataaagaactctatattttaagccgtatcctgctcaaaacagcactaaaaagatatcaacctgatgtctcattacaatcatggcaatttagtacgtgcaaatatggcaaaccatttatagtttttcctcagttggcaaaaaagattttttttaacctttcccatactatagatacagtagccgttgctattagttctcactgcgagcttggtgtcgatattgaacaaataagagatttagacaactcttatctgaatatcagtcagcatttttttactccacaggaagctactaacatagtttcacttcctcgttatgaaggtcaattacttttttggaaaatgtggacgctcaaagaagcttacatcaaatatcgaggtaaaggcctatctttaggactggattgtattgaatttcatttaacaaataaaaaactaacttcaaaatatagaggttcacctgtttatttctctcaatggaaaatatgtaactcatttctcgcattagcctctccactcatcacccctaaaataactattgagctatttcctatgcagtcccaactttatcaccacgactatcagctaattcattcgtcaaatgggcagaattgaatcgccacggataatctagacacttctgagccgtcgataatattgattttcatattccgtcggtggtgtaagtatcccgcataatcgtgccattcacatttag

SEQ ID NO: 351 - DNA, 424 bp, Artificial Sequence
  Synthetic
ggatggggggaaacatggataagttcaaagaaaaaaacccgttatctctgcgtgaaagacaagtattgcgcatgctggcacaaggtgatgagtactctcaaatatcacataatcttaacatatcaataaacacagtaaagtttcatgtgaaaaacatcaaacataaaatacaagctcggaatacgaatcacgctatacacattgctaacaggaatgagattatctaaatgaggattgatgtgtaggctggagctgcttcgaagttcctatactttctagagaataggaacttcggaataggaacttcggaataggaactaaggaggatattcatatgtcgtcaaatgggcagaattgaatcgccacggataatctagacacttctgagccgtcgataatattgattttcatattccgtcggtgg

SEQ ID NO: 352 - DNA, 2555 bp, Artificial Sequence
  Synthetic
actcttcctttttcaatattattgaagcatttatcagggttattgtctcatgagcggatacatatttgaatgtatttagaaaaataaacaaataggggaattaaaaaaaagcccgctcattaggcgggctactacctaggccgcggccgcgcgaattcgagctcggtacccggggatcctctagagtcgacctgcaggcatgcaagcttgcggccgcgtcgtgactgggaaaaccctggcgactagtcttggactcctgttgatagatccagtaatgacctcagaactccatctggatttgttcagaacgctcggttgccgccgggcgttttttattggtgagaatccaggggtccccaataattacgatttaaatcacagcaaacaccacgtcggccctatcagctgcgtgctttctatgagtcgttgctgcataacttgacaattaacatccggctcgtagggtttgtggagggcccaagttcacttaaaaaggagatcaacaatgaaagcaattttcgtactgaaacatcttaatcatgctggggagggtttctaatgttcacgggaagtattgtcgcgattgttactccgatggatgaaaaaggtaatgtctgtcgggctagcttgaaaaaactgattgattatcatgtcgccagcggtacttcggcgatcgtttctgttggcaccactggcgagtccgctaccttaaatcatgacgaacatgctgatgtggtgatgatgacgctggatctggctgatgggcgcattccggtaattgccgggaccggcgctaacgctactgcggaagccattagcctgacgcagcgcttcaatgacagtggtatcgtcggctgcctgacggtaaccccttactacaatcgtccgtcgcaagaaggtttgtatcagcatttcaaagccatcgctgagcatactgacctgccgcaaattctgtataatgtgccgtcccgtactggctgcgatctgctcccggaaacggtgggccgtctggcgaaagtaaaaaatattatcggaatcaaagaggcaacagggaacttaacgcgtgtaaaccagatcaaagagctggtttcagatgattttgttctgctgagcggcgatgatgcgagcgcgctggacttcatgcaattgggcggtcatggggttatttccgttacggctaacgtcgcagcgcgtgatatggcccagatgtgcaaactggcagcagaagggcattttgccgaggcacgcgttattaatcagcgtctgatgccattacacaacaaactatttgtcgaacccaatccaatcccggtgaaatgggcatgtaaggaactgggtcttgtggcgaccgatacgctgcgcctgccaatgacaccaatcaccgacagtggccgtgagacggtcagagcggcgcttaaacatgccggtttgctgtaagacttttgtcaggttcctactgtgacgactaccaccgatagactggagtgttgctgcgaaaaaaccccgccgaagcggggttttttgcgagaagtcaccacgattgtgctttacacggagtagtcggcagttccttaagtcagaatagtggacaggcggccaagaacttcgttcatgatagtctccggaacccgttcgagtcgttttccgccccgtgctttcatatcaattgtccggggttgatcgcaacgtacaacacctgtggtacgtatgccaacaccatccaacgacaccgcaaagccggcagtgcgggcaaaattgcctccgctggttacgggcacaacaacaggcaggcgggtcacgcgattaaaggccgccggtgtgacaatcagcaccggccgcgttccctgctgctcatgacctgcggtaggatcaagcgagacaagccagatttcccctctttccatctagtataactattgtttctctagtaacatttattgtacaacacgagcccatttttgtcaaataaattttaaattatatcaacgttaataagacgttgtcaataaaattattttgacaaaattggccggccggcgcgccgatctgaagatcagcagttcaacctgttgatagtacgtactaagctctcatgtttcacgtactaagctctcatgtttaacgtactaagctctcatgtttaacgaactaaaccctcatggctaacgtactaagctctcatggctaacgtactaagctctcatgtttcacgtactaagctctcatgtttgaacaataaaattaatataaatcagcaacttaaatagcctctaaggttttaagttttataagaaaaaaaagaatatataaggcttttaaagcctttaaggtttaacggttgtggacaacaagccagggatgtaacgcactgagaagcccttagagcctctcaaagcaattttgagtgacacaggaacacttaacggctgacatggggcgcgcccagctgtctagggcggcggatttgtcctactcaggagagcgttcaccgacaaacaacagataaaacgaaaggcccagtctttcgactgagcctttcgttttatttgatgcct

SEQ ID NO: 353 - DNA, 2472 bp, Artificial Sequence
  Synthetic
actcttcctttttcaatattattgaagcatttatcagggttattgtctcatgagcggatacatatttgaatgtatttagaaaaataaacaaataggggaattaaaaaaaagcccgctcattaggcgggctactacctaggccgcggccgcgcgaattcgagctcggtacccggggatcctctagagtcgacctgcaggcatgcaagcttgcggccgcgtcgtgactgggaaaaccctggcgactagtcttggactcctgttgatagatccagtaatgacctcagaactccatctggatttgttcagaacgctcggttgccgccgggcgttttttattggtgagaatccaggggtccccaataattacgatttaaatcacagcaaacaccacgtcggccctatcagctgcgtgctttctatgagtcgttgctgcataacttgacaattaatcatccggctcgtagggtttgtggagggcccaagttcacttaaaaaggagatcaacaatgaaagcaattttcgtactgaaacatcttaatcatgctggggagggtttctaatgaaacagtatttagaactgatgcaaaaagtgctcgacgaaggcacacagaaaaacgaccgtaccggaaccggaacgctttccatttttggtcatcagatgcgttttaacctgcaagatggattcccgctggtgacaactaaacgttgccacctgcgttccatcatccatgaactgctgtggtttcttcagggcgacactaacattgcttatctacacgaaaacaatgtcaccatctgggacgaatgggccgatgaaaacggcgacctcgggccagtgtatggtaaacagtggcgtgcctggccaacgccagatggtcgtcatattgaccagatcactacggtactgaaccagctgaaaaacgacccggattcgcgccgcattattgtttcagcgtggaacgtaggcgaactggataaaatggcgctggcaccgtgccatgcattcttccagttctatgtggcagacggcaaactctcttgccagctttatcagcgctcctgtgacgtcttcctcggcctgccgttcaacattgccagctacgcgttattggtgcatatgatggcgcagcagtgcgatctggaagtgggtgattttgtctggaccggtggcgacacgcatctgtacagcaaccatatggatcaaactcatctgcaattaagccgcgaaccgcgtccgctgccgaagttgattatcaaacgtaaacccgaatccatcttcgactaccgtttcgaagactttgagattgaaggctacgatccgcatccgggcattaaagcgccggtggctatctaagacttttgtcaggttcctactgtgacgactaccaccgatagactggagtgttgctgcgaaaaaaccccgccgaagcggggttttttgcgagaagtcaccacgattgtgctttacacggagtagtcggcagttccttaagtcagaatagtggacaggcggccaagaacttcgttcatgatagtctccggaacccgttcgagtcgttttccgccccgtgctttcatatcaattgtccggggttgatcgcaacgtacaacacctgtggtacgtatgccaacaccatccaacgacaccgcaaagccggcagtgcgggcaaaattgcctccgctggttacgggcacaacaacaggcaggcgggtcacgcgattaaaggccgccggtgtgacaatcagcaccggccgcgttccctgctgctcatgacctgcggtaggatcaagcgagacaagccagatttcccctctttccatctagtataactattgtttctctagtaacatttattgtacaacacgagcccatttttgtcaaataaattttaaattatatcaacgttaataagacgttgtcaataaaattattttgacaaaattggccggccggcgcgccgatctgaagatcagcagttcaacctgttgatagtacgtactaagctctcatgtttcacgtactaagctctcatgtttaacgtactaagctctcatgtttaacgaactaaaccctcatggctaacgtactaagctctcatggctaacgtactaagctctcatgtttcacgtactaagctctcatgtttgaacaataaaattaatataaatcagcaacttaaatagcctctaaggttttaagttttataagaaaaaaaagaatatataaggcttttaaagcctttaaggtttaacggttgtggacaacaagccagggatgtaacgcactgagaagcccttagagcctctcaaagcaattttgagtgacacaggaacacttaacggctgacatggggcgcgcccagctgtctagggcggcggatttgtcctactcaggagagcgttcaccgacaaacaacagataaaacgaaaggcccagtctttcgactgagcctttcgttttatttgatgcct

SEQ ID NO: 354 - DNA, 333 bp, Artificial Sequence
  Synthetic
ttaagtcagaatagtggacaggcggccaagaacttcgttcatgatagtctccggaacccgttcgagtcgttttccgccccgtgctttcatatcaattgtccggggttgatcgcaacgtacaacacctgtggtacgtatgccaacaccatccaacgacaccgcaaagccggcagtgcgggcaaaattgcctccgctggttacgggcacaacaacaggcaggcgggtcacgcgattaaaggccgccggtgtgacaatcagcaccggccgcgttccctgctgctcatgacctgcggtaggatcaagcgagacaagccagatttcccctctttccat

SEQ ID NO: 355 - DNA, 879 bp, Artificial Sequence
  Synthetic
atgttcacgggaagtattgtcgcgattgttactccgatggatgaaaaaggtaatgtctgtcgggctagcttgaaaaaactgattgattatcatgtcgccagcggtacttcggcgatcgtttctgttggcaccactggcgagtccgctaccttaaatcatgacgaacatgctgatgtggtgatgatgacgctggatctggctgatgggcgcattccggtaattgccgggaccggcgctaacgctactgcggaagccattagcctgacgcagcgcttcaatgacagtggtatcgtcggctgcctgacggtaaccccttactacaatcgtccgtcgcaagaaggtttgtatcagcatttcaaagccatcgctgagcatactgacctgccgcaaattctgtataatgtgccgtcccgtactggctgcgatctgctcccggaaacggtgggccgtctggcgaaagtaaaaaatattatcggaatcaaagaggcaacagggaacttaacgcgtgtaaaccagatcaaagagctggtttcagatgattttgttctgctgagcggcgatgatgcgagcgcgctggacttcatgcaattgggcggtcatggggttatttccgttacggctaacgtcgcagcgcgtgatatggcccagatgtgcaaactggcagcagaagggcattttgccgaggcacgcgttattaatcagcgtctgatgccattacacaacaaactatttgtcgaacccaatccaatcccggtgaaatgggcatgtaaggaactgggtcttgtggcgaccgatacgctgcgcctgccaatgacaccaatcaccgacagtggccgtgagacggtcagagcggcgcttaaacatgccggtttgctgtaa

SEQ ID NO: 356 - DNA, 795 bp, Artificial Sequence
  Synthetic
atgaaacagtatttagaactgatgcaaaaagtgctcgacgaaggcacacagaaaaacgaccgtaccggaaccggaacgctttccatttttggtcatcagatgcgttttaacctgcaagatggattcccgctggtgacaactaaacgttgccacctgcgttccatcatccatgaactgctgtggtttcttcagggcgacactaacattgcttatctacacgaaaacaatgtcaccatctgggacgaatgggccgatgaaaacggcgacctcgggccagtgtatggtaaacagtggcgtgcctggccaacgccagatggtcgtcatattgaccagatcactacggtactgaaccagctgaaaaacgacccggattcgcgccgcattattgtttcagcgtggaacgtaggcgaactggataaaatggcgctggcaccgtgccatgcattcttccagttctatgtggcagacggcaaactctcttgccagctttatcagcgctcctgtgacgtcttcctcggcctgccgttcaacattgccagctacgcgttattggtgcatatgatggcgcagcagtgcgatctggaagtgggtgattttgtctggaccggtggcgacacgcatctgtacagcaaccatatggatcaaactcatctgcaattaagccgcgaaccgcgtccgctgccgaagttgattatcaaacgtaaacccgaatccatcttcgactaccgtttcgaagactttgagattgaaggctacgatccgcatccgggcattaaagcgccggtggctatctaa

SEQ ID NO: 357 - protein, 110 aa, Artificial Sequence
  Synthetic
MERGEIWLVSLDPTAGHEQQGTRPVLIVTPAAFNRVTRLPVVVPVTSGGNFARTAGFAVSLDGVGIRTTGVVRCDQPRTIDMKARGGKRLERVPETIMNEVLGRLSTILT

SEQ ID NO: 358 - protein, 292 aa, Artificial Sequence
  Synthetic
MFTGSIVAIVTPMDEKGNVCRASLKKLIDYHVASGTSAIVSVGTTGESATLNHDEHADVVMMTLDLADGRIPVIAGTGANATAEAISLTQRFNDSGIVGCLTVTPYYNRPSQEGLYQHFKAIAEHTDLPQILYNVPSRTGCDLLPETVGRLAKVKNIIGIKEATGNLTRVNQIKELVSDDFVLLSGDDASALDFMQLGGHGVISVTANVAARDMAQMCKLAAEGHFAEARVINQRLMPLHNKLFVEPNPIPVKWACKELGLVATDTLRLPMTPITDSGRETVRAALKHAGLL

SEQ ID NO: 359 - protein, 264 aa, Artificial Sequence
  Synthetic
MKQYLELMQKVLDEGTQKNDRTGTGTLSIFGHQMRFNLQDGFPLVTTKRCHLRSIIHELLWFLQGDTNIAYLHENNVTIWDEWADENGDLGPVYGKQWRAWPTPDGRHIDQITTVLNQLKNDPDSRRIIVSAWNVGELDKMALAPCHAFFQFYVADGKLSCQLYQRSCDVFLGLPFNIASYALLVHMMAQQCDLEVGDFVWTGGDTHLYSNHMDQTHLQLSREPRPLPKLIIKRKPESIFDYRFEDFEIEGYDPHPGIKAPVAI

SEQ ID NO: 360 - DNA, 1490 bp, Artificial Sequence
  Synthetic
ttgacggctagctcagtcctaggtacagtgctagcggatctgctggaacaggtggtgagactcaaggtcatgatggacgtgaacaaaaaaacgaaaattcgccaccgaaacgagctaaatcacaccctggctcaacttcctttgcccgcaaagcgagtgatgtatatggcgcttgctcccattgatagcaaagaacctcttgaacgagggcgagttttcaaaattagggctgaagaccttgcagcgctcgccaaaatcaccccatcgcttgcttatcgacaattaaaagagggtggtaaattacttggtgccagcaaaatttcgctaagaggggatgatatcattgctttagctaaagagcttaacctgctctttactgctaaaaactcccctgaagagttagaccttaacattattgagtggatagcttattcaaatgatgaaggatacttgtctttaaaattcaccagaaccatagaaccatatatctctagccttattgggaaaaaaaataaattcacaacgcaattgttaacggcaagcttacgcttaagtagccagtattcatcttctctttatcaacttatcaggaagcattactctaattttaagaagaaaaattattttattatttccgttgatgagttaaaggaagagttaatagcttatacttttgataaagatggaaatattgagtacaaataccctgactttcctatttttaaaagggatgtgttaaataaagccattgctgaaattaaaaagaaaacagaaatatcgtttgttggcttcactgttcatgaaaaagaaggaagaaaaattagtaagctgaagttcgaatttgtcgttgatgaagatgaattttctggcgataaagatgatgaagctttttttatgaatttatctgaagctgatgcagcttttctcaaggtatttgatgaaaccgtacctcccaaaaaagctaaggggtgaggatctccaggcatcaaataaaacgaaaggctcagtcgaaagactgggcctttcgttttatctgttgtttgtcggtgaacgctctctactagagtcacactggctcaccttcgggtgggcctttctgcgtttatacccgggaaaaagagtattgacttaaagtctaacctataggtataatgtgtggagaccagaggtaaggaggtaacaaccatgcgagtgttgaagaaacatcttaatcatgctaaggaggttttctaatgcataccacccgactgaagagggttggcggctcagttatgctgaccgtcccaccggcactgctgaatgcgctgtctctgggcacagataatgaagttggcatggtcattgataatggccggctgattgttgagccgtacagacgcccgcaatattcactggctgagctactggcacagtgtgatccgaatgctgaaatatcagctgaagaacgagaatggctggatgcaccggcgactggtcaggaggaaatctga

SEQ ID NO: 361 - DNA, 1490 bp, Artificial Sequence
  Synthetic
ttgacggctagctcagtcctaggtacagtgctagcggatcttccggaagactaggtgagactcaaggtcatgatggacgtgaacaaaaaaacgaaaattcgccaccgaaacgagctaaatcacaccctggctcaacttcctttgcccgcaaagcgagtgatgtatatggcgcttgctcccattgatagcaaagaacctcttgaacgagggcgagttttcaaaattagggctgaagaccttgcagcgctcgccaaaatcaccccatcgcttgcttatcgacaattaaaagagggtggtaaattacttggtgccagcaaaatttcgctaagaggggatgatatcattgctttagctaaagagcttaacctgctctttactgctaaaaactcccctgaagagttagaccttaacattattgagtggatagcttattcaaatgatgaaggatacttgtctttaaaattcaccagaaccatagaaccatatatctctagccttattgggaaaaaaaataaattcacaacgcaattgttaacggcaagcttacgcttaagtagccagtattcatcttctctttatcaacttatcaggaagcattactctaattttaagaagaaaaattattttattatttccgttgatgagttaaaggaagagttaatagcttatacttttgataaagatggaaatattgagtacaaataccctgactttcctatttttaaaagggatgtgttaaataaagccattgctgaaattaaaaagaaaacagaaatatcgtttgttggcttcactgttcatgaaaaagaaggaagaaaaattagtaagctgaagttcgaatttgtcgttgatgaagatgaattttctggcgataaagatgatgaagctttttttatgaatttatctgaagctgatgcagcttttctcaaggtatttgatgaaaccgtacctcccaaaaaagctaaggggtgaggatctccaggcatcaaataaaacgaaaggctcagtcgaaagactgggcctttcgttttatctgttgtttgtcggtgaacgctctctactagagtcacactggctcaccttcgggtgggcctttctgcgtttatacccgggaaaaagagtattgacttaaagtctaacctataggtataatgtgtggagaccagaggtaaggaggtaacaaccatgcgagtgttgaagaaacatcttaatcatgctaaggaggttttctaatgcataccacccgactgaagagggttggcggctcagttatgctgaccgtcccaccggcactgctgaatgcgctgtctctgggcacagataatgaagttggcatggtcattgataatggccggctgattgttgagccgtacagacgcccgcaatattcactggctgagctactggcacagtgtgatccgaatgctgaaatatcagctgaagaacgagaatggctggatgcaccggcgactggtcaggaggaaatctga

SEQ ID NO: 362 - DNA, 917 bp, Artificial Sequence
  Synthetic
tgagactcaaggtcatgatggacgtgaacaaaaaaacgaaaattcgccaccgaaacgagctaaatcacaccctggctcaacttcctttgcccgcaaagcgagtgatgtatatggcgcttgctcccattgatagcaaagaacctcttgaacgagggcgagttttcaaaattagggctgaagaccttgcagcgctcgccaaaatcaccccatcgcttgcttatcgacaattaaaagagggtggtaaattacttggtgccagcaaaatttcgctaagaggggatgatatcattgctttagctaaagagcttaacctgctctttactgctaaaaactcccctgaagagttagaccttaacattattgagtggatagcttattcaaatgatgaaggatacttgtctttaaaattcaccagaaccatagaaccatatatctctagccttattgggaaaaaaaataaattcacaacgcaattgttaacggcaagcttacgcttaagtagccagtattcatcttctctttatcaacttatcaggaagcattactctaattttaagaagaaaaattattttattatttccgttgatgagttaaaggaagagttaatagcttatacttttgataaagatggaaatattgagtacaaataccctgactttcctatttttaaaagggatgtgttaaataaagccattgctgaaattaaaaagaaaacagaaatatcgtttgttggcttcactgttcatgaaaaagaaggaagaaaaattagtaagctgaagttcgaatttgtcgttgatgaagatgaattttctggcgataaagatgatgaagctttttttatgaatttatctgaagctgatgcagcttttctcaaggtatttgatgaaaccgtacctcccaaaaaagctaaggggtga

SEQ ID NO: 363 - DNA, 255 bp, Artificial Sequence
  Synthetic
cataccacccgactgaagagggttggcggctcagttatgctgaccgtcccaccggcactgctgaatgcgctgtctctgggcacagataatgaagttggcatggtcattgataatggccggctgattgttgagccgtacagacgcccgcaatattcactggctgagctactggcacagtgtgatccgaatgctgaaatatcagctgaagaacgagaatggctggatgcaccggcgactggtcaggaggaaatctga

SEQ ID NO: 364 - DNA, 14 bp, Artificial Sequence
  Synthetic
gctggaacaggtgg

SEQ ID NO: 365 - DNA, 14 bp, Artificial Sequence
  Synthetic
tccggaagactagg

SEQ ID NO: 366 - DNA, 18 bp, Artificial Sequence
  Synthetic
ttgttgayryrtcaacwa

SEQ ID NO: 367 - DNA, 15 bp, Artificial Sequence
  Synthetic
  misc_feature (8)..(8): n is a, c, g, or t
ttataatnattataa

SEQ ID NO: 368 - DNA, 22 bp, Artificial Sequence
  Synthetic
ggaattgtgagcgctcacaatt

1. An engineered bacterium comprising a gene sequence or gene cassette for producing one or more aryl hydrocarbon receptor (AhR) agonist(s), wherein the gene sequence or gene cassette is operably linked to a directly or indirectly inducible promoter that is not associated with the gene sequence or gene cassette in nature.

2. The engineered bacterium of claim 1, wherein the engineered bacterium comprises gene sequence for producing indole-3-acetonitrile.

3. The engineered bacterium of claim 2, wherein the engineered bacterium comprises gene sequence encoding cyp79B2 (tryptophan N-monooxygenase).

4. The genetically engineered bacteria of claim 2 or claim 3, wherein the engineered bacterium comprises gene sequence encoding cyp71a13 (indoleacetaldoxime dehydratase).

5. The genetically engineered bacteria of any of claims 2-4, wherein the engineered bacterium comprises gene sequence encoding cyp79B3 (tryptophan N-monooxygenase).

6. The genetically engineered bacteria of claim 5, wherein the cyp79B2, cyp71a13, and cyp79B3 are from Arabidopsis thaliana.

7. The bacterium of any of claims 1-6, wherein the bacterium comprises a gene or gene cassette for producing indole-3-propionic acid.

8. The genetically engineered bacteria of claim 7, wherein the engineered bacterium comprises gene sequence encoding tryptophan ammonia lyase.

9. The genetically engineered bacyteris of claim 8, wherein the tryptophan ammonia lyase is from Rubrivivax benzoatilyticus.

10. The genetically engineered bacterium of any of claims 7-9, wherein the engineered bacterium comprises one or more gene sequences encoding indole-3-acrylate reductase.

11. The genetically engineered bacterium of claim 10, wherein the ndole-3-acrylate reductase is from Clostridum botulinum.

12. The genetically engineered bacterium of any of claims 7-11, wherein the engineered bacterium comprises gene sequence encoding Tryptophan dehydrogenase (trpDH).

13. The genetically engineered bacteria of claim 12, wherein the trpDH is from Nostoc punctiforme NIES-2108.

14. The genetically engineered bacterium of any of claims 7, claim 12 and claim 13, wherein the engineered bacterium comprises gene sequence encoding fldA (indole-3-propionyl-CoA:indole-3-lactate CoA transferase).

15. The genetically engineered bacterium of claim 14, wherein the fldA is from Clostridium sporogenes.

16. The genetically engineered bacterium of any of claims 7 and claims 12-15, wherein the bacterium comprises gene sequence(s) encoding fldB and fldC (indole-3-lactate dehydratase).

17. The genetically engineered bacterium of claim 16, wherein the fldB and fldC is from Clostridium sporogenes.

18. The genetically engineered bacterium of any of claims 7 and claims 12-17, wherein the engineered bacterium comprises gene sequences encoding fldD (indole-3-acrylyl-CoA reductase).

19. The genetically engineered bacterium of claim 18, wherein the fldD is from Clostridium sporogenes.

20. The genetically engineered bacterium of any of claims 7 and claims 12-19, wherein the engineered bacterium comprises gene sequences encoding Acul (acrylyl-CoA reductase).

21. The genetically engineered bacteria of claim 20, wherein the Acul is from Rhodobacter sphaeroides.

22. The genetically engineered bacterium of any of claims 7 and claims 12-21, wherein the engineered bacterium comprises gene sequence encoding fldH1 (3-lactate dehydrogenase 1).

23. The genetically engineered bacterium of claim 22, wherein the fldH1 is from Clostridium sporogenes.

24. The genetically engineered bacterium of any of claims 7 and claims 12-23, wherein the engineered bacterium comprises gene sequence encoding fldH2 (indole-3-lactate dehydrogenase 2).

25. The genetically engineered bacteria of claim 24, wherein the fldH2 is from Clostridium sporogenes.

26. The genetically engineered bacterium of claim 12, wherein the engineered bacterium comprises gene sequences encoding trpDH, fldA, fldB, flD, and fldH1.

27. The genetically engineered bacterium of claim 12, wherein the engineered bacterium comprises gene sequences encoding trpDH, fldA, fldB, flD, and fldH2.

28. The genetically engineered bacterium of claim 12, wherein the engineered bacterium comprises gene sequence encoding trpDH, fldA, fldB, acuI and fldH1.

29. The genetically engineered bacterium of claim 12, wherein the engineered bacterium comprises gene sequence encoding trpDH, fldA, fldB, acuI and fldH2.

30. The genetically engineered bacterium of any of claims 1-29, wherein the engineered bacterium comprises gene sequence for producing tryptamine.

31. The engineered bacteria of claim 30, wherein the engineered bacterium comprises gene sequence encoding Tryptophan decarboxylase.

32. The engineered bacterium of claim 31, wherein the Tryptophan decarboxylase is from Catharanthus roseus.

33. The engineered bacterium of any of claims 1-32, wherein the engineered bacterium comprises gene sequence for producing producing indole-3-acetaldehyde.

34. The genetically engineered bacterium of claim 33, wherein the engineered bacterium comprises gene sequence encoding aro9 (L-tryptophan aminotransferase).

35. The genetically engineered bacterium of claim 33 or claim 34, wherein the engineered bacterium comprises gene sequence encoding aspC (aspartate aminotransferase.

36. The genetically engineered bacterium of any of claims 33-35, wherein the engineered bacterium comprises gene sequence encoding taal (L-tryptophan-pyruvate aminotransferase.

37. The genetically engineered bacterium of any of claims 33-36, wherein the engineered bacterium comprises gene sequence encoding staO (L-tryptophan oxidase).

38. The genetically engineered bacterium of any of claims 33-37, wherein the engineered bacterium comprises gene sequence encoding trpDH (Tryptophan dehydrogenase).

39. The genetically engineered bacterium of any of claims 33-38, wherein the engineered bacterium comprises gene sequence encoding ipdC (Indole-3-pyruvate decarboxylase).

40. The genetically engineered bacterium of claim 33, wherein the engineered bacterium comprises gene sequence encoding tdc (Tryptophan decarboxylase).

41. The genetically engineered bacterium of claim 33 or claim 40, wherein the engineered bacterium comprises gene sequence encoding tynA (Monoamine oxidase).

42. The genetically engineered bacterium of any of claims 1-41, wherein the engineered bacterium comprises gene sequence for producing indole-3-acetic acid.

43. The genetically engineered bacterium of claim 42, wherein the bacterium comprises gene sequence encoding one or more of the following: aro9 (L-tryptophan aminotransferase), aspC (aspartate aminotransferase), taal (L-tryptophan-pyruvate aminotransferase), staO (L-tryptophan oxidase), trpDH (Tryptophan dehydrogenase), iad1 (Indole-3-acetaldehyde dehydrogenase), AAO1 (Indole-3-acetaldehyde oxidase), ipdC (Indole-3-pyruvate decarboxylase), ipdC (Indole-3-pyruvate decarboxylase), tdc (Tryptophan decarboxylase), tynA (Monoamine oxidase), yuc2 (indole-3-pyruvate monooxygenase), IaaM (Tryptophan 2-monooxygenase), and iaaH (Indoleacetamide hydrolase).

44. The genetically engineered bacterium of any of claims 1-43, wherein the bacterium further comprises gene sequence for producing tryptophan.

45. The genetically engineered bacterium of any of claims 1-44, wherein the bacterium further comprises gene sequence encoding one or more tryptophan transporters.

46. The genetically engineered bacterium of claim 45, wherein the tryptophan transporter is selected from mtr, aroP, and tnaB.

47. The bacterium of any of claims 1-46, wherein the bacterium further comprises gene sequence for producing kynurenine.

48. The bacterium of any of claims 1-47, wherein the bacterium further comprises a gene sequence for producing kynurenic acid.

49. The bacterium of any of claims 1-48, wherein the bacterium further comprises a gene sequence for producing an indole.

50. The genetically engineered bacterium of any of claims 1-49, wherein the bacterium further comprises gene sequence encoding a non-native metabolic or satiety effector molecule.

51. The bacterium of claim 50, wherein the metabolic or satiety effector molecule is selected from a a short-chain fatty acid, butyrate, propionate, acetate, GLP-1, IL-22, IL-10, bile salt hydrolase, n-acyl-phophatidylethanolamine (NAPE), a n-acyl-ethanolamines (NAE), a ghrelin receptor antagonist, peptide YY3-36, a cholecystokinin (CCK), CCK58, CCK33, CCK22, CCK8, a bombesin, gastrin releasing peptide (GRP), neuromedin B (P), glucagon, GLP-1, GLP-2, apolipoprotein A-IV, amylin, somatostatin, entero statin, oxyntomodulin, pancreatic peptide, a serotonin receptor agonist, nicotinamide adenine dinucleotide (NAD), nicotinamide mononucleotide (NMN),nucleotide riboside (NR), nicotinamide, and nicotinic acid (NA).

52. The bacterium of claim 51, wherein the metabolic or satiety effector molecule is a short-chain fatty acid.

53. The bacterium of claim 52, wherein the metabolic or satiety effector molecule is butyrate.

54. The bacterium of claim 52, wherein the metabolic or satiety effector molecule is propionate.

55. The bacterium of claim 52, wherein the metabolic or satiety effector molecule is GLP1.

56. The bacterium of any of claims 1-55, wherein the gene sequence is operably linked to a directly or indirectly inducible promoter that is induced by exogenous environmental conditions.

57. The bacterium of claim 56, wherein the promoter is directly or indirectly induced by exogenous environmental conditions found in the mammalian gut.

58. The bacterium claim 57, wherein the promoter is directly or indirectly induced by low-oxygen or anaerobic conditions.

59. The bacterium of claim 58, wherein the promoter is selected from a FNR-inducible promoter, an ANR-inducible promoter, and a DNR-inducible promoter.

60. The bacterium of claim 59, wherein the promoter is a FNR-inducible promoter.

61. The bacterium of any of claims 1-57, wherein the promoter is regulated by a reactive nitrogen species (RNS).

62. The bacterium of any of claims 1-57, wherein the promoter is regulated by a reactive oxygen species (ROS).

63. The bacterium of any one of claims 1-62, wherein the gene sequence and operatively linked promoter are present on a plasmid in the bacterium.

64. The bacterium of any one of claims 1-62, wherein the gene sequence and operatively linked promoter are present on a chromosome in the bacterium.

65. The bacterium of any one of claims 1-64, wherein the bacterium is an auxotroph comprising a deletion or mutation in a gene required for cell survival and/or growth.

66. The genetically engineered bacterium of claim 65, wherein the bacterium is an auxotroph in diaminopimelic acid or an enzyme in the thymidine biosynthetic pathway.

67. The bacterium of any one of claims 1-66, wherein the bacterium comprises a kill switch.

68. The bacterium of any of claims 1-67, wherein the bacterium is a non-pathogenic bacterium.

69. The bacterium of claim 68, wherein the bacterium is a probiotic or a commensal bacterium.

70. The bacterium of claim 69, wherein the bacterium is selected from the group consisting of Bacteroides, Bifidobacterium, Clostridium, Escherichia, Lactobacillus, and Lactococcus.

71. The bacterium of claim 70, wherein the bacterium is Escherichia coli strain Nissle.

72. A pharmaceutically acceptable composition comprising the bacterium of any one of claims 1-71; and a pharmaceutically acceptable carrier.

73. The pharmaceutically acceptable composition of claim 72, wherein the composition is formulated for oral or rectal administration.

74. A method of treating a metabolic disease in a subject in need thereof comprising the step of administering to the subject the composition of claim 72 or claim 73.

75. The method of claim 74, wherein the disorder of condition is selected from the group consisting of: type 1 diabetes; type 2 diabetes; metabolic syndrome; Bardet-Biedel syndrome; Prader-Willi syndrome; non-alcoholic fatty liver disease; tuberous sclerosis; Albright hereditary osteodystrophy; brain-derived neurotrophic factor (BDNF) deficiency; Single-minded 1 (SIM1) deficiency; leptin deficiency; leptin receptor deficiency; pro-opiomelanocortin (POMC) defects; proprotein convertase subtilisin/kexin type 1 (PCSK1) deficiency; Src homology 2B1 (SH2B1) deficiency; pro-hormone convertase 1/3 deficiency; melanocortin-4-receptor (MC4R) deficiency; Wilms tumor, aniridia, genitourinary anomalies, and mental retardation (WAGR) syndrome; pseudohypoparathyroidism type 1A; Fragile X syndrome; Borjeson-Forsmann-Lehmann syndrome; Alstrom syndrome; Cohen syndrome; and ulnar-mammary syndrome.
